United States Patent Application Publication US 2007/0105114 A1 - sequence listing, part 3

SEQ ID NO: 2502 - DNA, 3746 bp, Homo sapiens
gcccggcgttaacaaagggagccgataccgaccggcgtgggcgcggagcgggcggccgccaccgagcgtgctgagcaaccgcagcctccgcggccgagagtgcagcgagcaaggggagagccagttgcgcagagccctgcaaccagcagtccagggagaagtggtgaatgtcatggagcccagctgaaatggactggcccccttgagcctgtcccaagccctggtgccaggtgtccatccccgtgctgagatgagttttgatcatcctgagaaaaatgggccttggcctgcagacccaataaaccttccctcccatggataatagtgctaattcctgaggacctgaagggcctgccgcccctgggggattagccagaagcagatgatcatgacgcagtcctgaggtttaatggggcacccacagccaacttccaacaagatgtgggcacaaaaactaccattcgcctgatgaactctcagttggttaccacagagaagcgcttcctcaaagacagtttgtacaatgaaggaatcctaattgtatgggacccatctgtataccactcagatatcccaaagtggtaccagaatccggattataatttctttaacaactacaagacttatcgtaagctgcaccccaatcagcccttttacatcctcaagccccagatgccttgggagctatgggacattcttcaagaaatctccccagaagagattcagccaaaccccccatcctctgggatgcttggtatcatcatcatgatgacgctgtgtgaccaggtggatatttatgagttcctcccatccaagcgcaagactgacgtgtgctactactaccagaagttcttcgatagtgcctgcacgatgggtgcctaccacccgctgctctatgagaagaatttggtgaagcatctcaaccagggcacagatgaggacatctacctgcttggaaaagccacactgcctggcttccggaccattcactgctaagcacaggctcctcactcttctccatcaggcattaaatgaatggtctcttggccaccccagcctgggaagaacattttcctgaacaattccagcctgctccttttactctaggggcctctgtcagcaagaccatggggacttcaagagcctgtggtcaggaaatcaggtccagccttccctgtagccagacagtttatgagcccagagcctcctgccacacacatgcacacatatctagcattctttccagacagcatcctccccgccttccaccttggtagatgcaaggtctatctctcccatcagggctgccaaagctgggctttgtttttcccagcagaatgatgccattctcacaaaccaatgctctatattgcttgaagtctgcatctaaatattgatttcacgttttaaagaaattctcttaaattacaattgtgcccaatgcagggtggctctggggggcaagtaggtggtacaggggattggaaacatgctccgcgcctccagagaaaagttgctcccgaggtccatgcccctggaacgtgttcctatcactctggctggttgggctggtccttagactgggtgcttatgattaaagggtcttggttagcccactttccctctccatgtggagatggaaggtagagaaggatacagtgtctatcctcaagttgctacggttcagtgagagaggcagacatctgaacaggcaggtaggattcagtgtgctcagtgcactggggatttggagagagatgggcttgctctctctgtgcacccaggagggccacgcacttaaaactgtgtttgtggatcagagaaggctttatagcacagggggcattcagatgagtcttagaggaagagaagaaacatggcaagcagattacatctgagccgtttgaattgtgtttttctttcttcccatgtttattttctaagatctacctgaacttagagactcaagatatttttttaggaaacctcctacccatgtctgaggtagcaagtgcagcctcacgacagataccaggcaatccagagccacaaaacgtgattcctccaggctctgcctggcctgaccctgtcctgtcagctgggtttacataccagtcccattcttccttttcaatacctacccccaaatcttctcctaaccaccatctgttttttttttttaaagcattttttgctttaaaagcatcctgaccccaatttctttgagctcacgggccttttgctgaaggtctctcagggtgtagtggtgtggctctctggacttaacgtcactctcagaggtcagaaccttggagatcagaactgattctcaccaggtgtgagaggtgtggtagcagattgcaatgctctgcacctcttccttgcaagtgagcaacttcaggctctctgggcagaggctggcccactgtagtttgcagacatgctctccagatggttttactaagtcccctctccctgatagggaatcctgctggaccagcgcagccctggtgtggagaggttaaaagacttgcacaggatcaccaagtcatgctgtagagccaggattcctagacccagggctctgcactctcaaggctggccccatgtgctcaaggggatctaatgtttgggctccaaactaaccatctcggagctgggctcctcatttactgccaaaccctcagcttatgtagctagaaagggccctggagtgagaaagcctggattttcaaattgatgctcccctactgactagctgtgccactctgggcaaatgctcttccttgagcctgtttccacacctgtaaagtggggatgatgatcctatctcactgcttttgtgaggattacaggaaagcacctgtcctggctctgtacctggcacgtagtaggtgctcagttcatgctggtttccttcctgcctttagtagggacctgctctgtgctcacacctcggctgcatgcaccctgctgtgacggaggctagtgtggaagaggtcctgtcctcagggaattaactgtcttattgggagacaacaactgtcctccttggaacacccaagaaaccatgcaaagcagtggacaacacagaacacgccctcctcctcgctgcctgcagctccaatctgattctgcttgggaatgggcggagcacgtgggctgcttaactgctgtataggacaagccccttacccctctctgggcccatgaattcctggcttggtttatgttctgatttgacacactgattttaatcttcgaatcatgacactgagtgcagaggaggtggcattccgacagcaggacatacatgttggtgtgaagactgggacgacactgggtagaatctagtttttaattattattaatataaaggatcaaattaatttaaatatgattctgaagtctacagaacttttagttctgtgctgtctatgtggacactttggtaaaatgcaaattatgatatggacgttatcattggtctggtgagatgtttcatatttgtgacagttaatttaaaaattatgagttaatgctgcctgtgtctatggggttctgtcttctttgatagccatctattcatctggatcatgggaccctctctaatccttccaccaatcaaataagctattgctattggtttggagttgagatatcagtctcggaaacttctgaaaaatgctaataattacccaaggattatgtcaaattttaaaataaatgtgtgtgtgtttctttaa

SEQ ID NO: 2503 - protein, 175 aa, Homo sapiens
MNSQLVTTEKRFLKDSLYNEGILIVWDPSVYHSDIPKWYQNPDYNFFNNYKTYRKLHPNQPFYILKPQMPWELWDILQEISPEEIQPNPPSSGMLGIIIMMTLCDQVDIYEFLPSKRKTDVCYYYQKFFDSACTMGAYHPLLYEKNLVKHLNQGTDEDIYLLGKATLPGFRTIHC

SEQ ID NO: 2504 - DNA, 1735 bp, Homo sapiens
agagactcgtgccgaatggcacgaggccgacgggcccgcggggccggcgccgccatggcggccgtgtttgatttggatttggagacggaggaaggcagcgagggcgagggcgagccagagctcagccccgcggacgcatgtccccttgccgagttgagggcagctggcctagagcctgtgggacactatgaagaggtggagctgactgagaccagcgtgaacgttggcccagagcgcatcgggccccactgctttgagctgctgcgtgtgctgggcaaggggggctatggcaaggtgttccaggtgcgaaaggtgcaaggcaccaacttgggcaaaatatatgccatgaaagtcctaaggaaggccaaaattgtgcgcaatgccaaggacacagcacacacacgggctgagcggaacattctagagtcagtgaagcacccctttattgtggaactggcctatgccttccagactggtggcaaactctacctcatccttgagtgcctcagtggtggcgagctcttcacgcatctggagcgagagggcatcttcctggaagatacggcctgcttctacctggctgagatcacgctggccctgggccatctccactcccagggcatcatctaccgggacctcaagcccgagaacatcatgctcagcagccagggccacatcaaactgaccgactttggactctgcaaggagtctatccatgagggcgccgtcactcacaccttctgcggcaccattgagtacatggcccctgagattctggtgcgcagtggccacaaccgggctgtggactggtggagcctgggggccctgatgtacgacatgctcactggatcgccgccctttaccgcagagaaccggaagaaaaccatggataagatcatcaggggcaagctggcactgcccccctacctcaccccagatgcccgggaccttgtcaaaaagtttctgaaacggaatcccagccagcggattgggggtggcccaggggatgctgctgatgtgcagagacatccctttttccggcacatgaattgggacgaccttctggcctggcgtgtggacccccctttcaggccctgtctgcagtcagaggaggacgtgagccagtttgatacccgcttcacacggcagacgccggtggacagtcctgatgacacagccctcagcgagagtgccaaccaggccttcctgggcttcacatacgtggcgccgtctgtcctggacagcatcaaggagggcttctccttccagcccaagctgcgctcacccaggcgcctcaacagtagcccccgggtccccgtcagccccctcaagttctccccttttgaggggtttcggcccagccccagcctgccggagcccacggagctacctctacctccactcctgccaccgccgccgccctcgaccaccgcccctctccccatccgtcccccctcagggaccaagaagtccaagaggggccgtgggcgtccagggcgctaggaagccgggtgggggtgagggtagcccttgagccctgtccctgcggctgtgagagcagcaggaccctgggccagttccagagacctgggggtgtgtctgggggtggggtgtgagtgcgtatgaaagtgtgtgtctgctggggcagctgtgcccctgaatcatgggcacggagggccgcccgccacaccccgcgctcaactgctcccgtggaagattaaagggctgaatcatg

SEQ ID NO: 2505 - protein, 495 aa, Homo sapiens
MARGRRARGAGAAMAAVFDLDLETEEGSEGEGEPELSPADACPLAELRAAGLEPVGHYEEVELTETSVNVGPERIGPHCFELLRVLGKGGYGKVFQVRKVQGTNLGKIYAMKVLRKAKIVRNAKDTAHTRAERNILESVKHPFIVELAYAFQTGGKLYLILECLSGGELFTHLEREGIFLEDTACFYLAEITLALGHLHSQGIIYRDLKPENIMLSSQGHIKLTDFGLCKESIHEGAVTHTFCGTIEYMAPEILVRSGHNRAVDWWSLGALMYDMLTGSPPFTAENRKKTMDKIIRGKLALPPYLTPDARDLVKKFLKRNPSQRIGGGPGDAADVQRHPFFRHMNWDDLLAWRVDPPFRPCLQSEEDVSQFDTRFTRQTPVDSPDDTALSESANQAFLGFTYVAPSVLDSIKEGFSFQPKLRSPRRLNSSPRVPVSPLKFSPFEGFRPSPSLPEPTELPLPPLLPPPPPSTTAPLPIRPPSGTKKSKRGRGRPGR

SEQ ID NO: 2506 - DNA, 3507 bp, Homo sapiens
ccacgcgtccgagcggggcgcctgggtggatgggcgcttgggcgcctgggctgccggacggtgggaacggaagtcgctgtgggacgctgaggaagccaggatggcgactccgagcaagaagacgtcaactccaagcccccagccttccaagagagctctcccgagagacccttcgtcggaggtcccgagcaagaggaagaattcggccccgcagctgccgctgttgcagtcgtccgggcctttcgtggaaggctctatcgtccgcatctcgatggagaacttcctaacatatgatatttgtgaagtatctcctggaccccacttgaatatgatcgttggagccaatggaacagggaagtcgagcattgtgtgtgccatttgccttggtttagctggaaaacctgctttcatgggacgagcagataaggttgggttttttgtgaagagaggatgttctagaggcatggttgaaattgaattgttcagggcttctggaaatcttgtaatcacccgtgagattgatgtggcaaaaaatcagtccttttggttcatcaacaaaaaatctacaacccagaaaatagtggaagagaaagttgcagccttaaatattcaagtggggaatctttgccagtttctccctcaggacaaagttggagaatttgctaaactcagcaaaattgaactcctcgaagccactgaaaagtcaattggtcccccagaaatgcacaaatatcactgtgaactcaaaaacttaagggagaaagaaaaacagctcgagacctcatgcaaagagaaaactgagtatctacagaaaatggttcagaggaatgaaagatataaacaagatgtggagaggttctatgaacggaagcgacatttagatttaattgagatgcttgaagcaaaaaggccatgggtggaatatgaaaatgttcgtcaggaatatgaagaagtaaaactagttcgtgaccgagtgaaggaagaggtcagaaaacttaaagaagggcagattcctataacatgtcgaattgaagaaatggaaaacgagcgtcacaatttggaggctcgaatcaaagaaaaggcaacagatattaaggaggcatctcaaaaatgcaaacagaagcaagatgttatagaaaggaaagataaacatattgaggaacttcagcaggctttaatagtaaagcaaaatgaagagcttgaccgacagaggagaataggtaatacccgcaaaatgatagaggatttgcaaaatgaactaaagaccacggaaaactgcgagaatcttcagccccagattgatgccattacaaatgatctgagacggattcaggatgaaaaggcattatgtgaaggcgaaataattgataagcgaagagagagggaaactctagagaaggagaaaaagagtgtggacgatcatattgtacgttttgacaatcttatgaatcagaaggaagataagctaagacagagattccgtgacacgtatgatgctgttttatggctaagaaataacagagacaaatttaaacaaagagtctgtgagcccataatgctcacgatcaatatgaaagataataaaaatgccaaatatattgaaaatcatattccatcaaatgacttaagagcctttgtatttgaaagtcaagaagatatggaggttttcctcaaagaggttcgtgacaataaaaaattaagagtaaatgctgttattgctcccaagagttcatatgcagacaaagcaccttcaagatctttgaatgaacttaaacaatacggatttttctcttatttgagagaattatttgatgcacctgatcctgtaatgagttacctttgctgtcagtatcatattcatgaagttcctgtaggaactgaaaagaccagagaaagaattgaacgggtaatacaagaaacccgattaaaacagatttatacagcagaagaaaagtatgtggtgaaaacttctttttattcaaacaaagttatttctagtaacacatctctaaaagtagcgcagtttctcactgtcactgtggacctagagcagagaagacacttagaagaacagctaaaggaaattcatagaaaattgcaagcagtggattcagggttgattgccttacgtgaaacaagcaaacatctggagcacaaagacaatgaacttagacaaaagaagaaggagcttcttgagagaaaaaccaagaaaagacaactggaacaaaaaatcagttccaaactaggaagtttaaagctgatggaacaggatacttgcaatcttgaagaggaagagcgaaaagcaagtaccaaaatcaaagaaataaatgttcaaaaagcgaaacttgttaccgaattaacaaacctaataaagatttgtacttctttgcatatacaaaaagtagatttaattctccaaaatactacagtgatctctgagaagaacaaattagaatcagattatatggccgcatcttcacaactccgtcttacagagcaacatttcattgaattggatgaaaatagacagagattattgcagaaatgcaaggaacttatgaaaagagctaggcaagtatgtaacctgggtgcagagcagactcttcctcaagaataccagacacaagtacccaccattccaaatggacacaactcctcactccccatggttttccaagaccttccaaacacattggatgaaattgatgctttattaactgaagaaagatcaagagcttcctgcttcacgggactgaatcctacaattgttcaggaatatacaaaaagagaagaagaaatagaacagttaactgaggaactaaagggaaagaaagttgaactagatcaatacagggaaaacatttcacaggtaaaagaaaggtggcttaatcctttaaaagagctggtagaaaaaattaatgaaaaattcagcaatttttttagttccatgcagtgtgctggtgaagttgatctccatacagaaaatgaggaagattatgataaatatggaattcgaattagagtcaaatttcgaagtagtactcaactgcatgaattaactcctcatcatcaaagtggaggtgaaagaagtgtttctaccatgttatacttgatggcacttcaggagctaaatagatgtccattcagagtagttgatgaaatcaatcagggaatggacccaatcaatgaacggagagtgtttgaaatggttgtaaatactgcctgtaaagaaaatacatctcaatactttttcataacaccaaagctcctgcaaaatcttccttattctgaaaagatgacagttttgtttgtctacaatggccctcatatgctggaaccaaacacatggaatttaaaggctttccaaaggcggcggcgccgtattacattcactcaaccttcttaataaaagtaaagagagggaacttgggaattttttttgttaaattctgtttataagtatggctcaactgaataaaaggagattcactaaaaaaaaaaaaaaaa

SEQ ID NO: 2507 - protein, 1101 aa, Homo sapiens
MATPSKKTSTPSPQPSKRALPRDPSSEVPSKRKNSAPQLPLLQSSGPFVEGSIVRISMENFLTYDICEVSPGPHLNMIVGANGTGKSSIVCAICLGLAGKPAFMGRADKVGFFVKRGCSRGMVEIELFRASGNLVITREIDVAKNQSFWFINKKSTTQKIVEEKVAALNIQVGNLCQFLPQDKVGEFAKLSKIELLEATEKSIGPPEMHKYHCELKNLREKEKQLETSCKEKTEYLQKMVQRNERYKQDVERFYERKRHLDLIEMLEAKRPWVEYENVRQEYEEVKLVRDRVKEEVRKLKEGQIPITCRIEEMENERHNLEARIKEKATDIKEASQKCKQKQDVIERKDKHIEELQQALIVKQNEELDRQRRIGNTRKMIEDLQNELKTTENCENLQPQIDAITNDLRRIQDEKALCEGEIIDKRRERETLEKEKKSVDDHIVRFDNLMNQKEDKLRQRFRDTYDAVLWLRNNRDKFKQRVCEPIMLTINMKDNKNAKYIENHIPSNDLRAFVFESQEDMEVFLKEVRDNKKLRVNAVIAPKSSYADKAPSRSLNELKQYGFFSYLRELFDAPDPVMSYLCCQYHIHEVPVGTEKTRERIERVIQETRLKQIYTAEEKYVVKTSFYSNKVISSNTSLKVAQFLTVTVDLEQRRHLEEQLKEIHRKLQAVDSGLIALRETSKHLEHKDNELRQKKKELLERKTKKRQLEQKISSKLGSLKLMEQDTCNLEEEERKASTKIKEINVQKAKLVTELTNLIKICTSLHIQKVDLILQNTTVISEKNKLESDYMAASSQLRLTEQHFIELDENRQRLLQKCKELMKRARQVCNLGAEQTLPQEYQTQVPTIPNGHNSSLPMVFQDLPNTLDEIDALLTEERSRASCFTGLNPTIVQEYTKREEEIEQLTEELKGKKVELDQYRENISQVKERWLNPLKELVEKINEKFSNFFSSMQCAGEVDLHTENEEDYDKYGIRIRVKFRSSTQLHELTPHHQSGGERSVSTMLYLMALQELNRCPFRVVDEINQGMDPINERRVFEMVVNTACKENTSQYFFITPKLLQNLPYSEKMTVLFVYNGPHMLEPNTWNLKAFQRRRRRITFTQPS

SEQ ID NO: 2508 - DNA, 2394 bp, Homo sapiens
cgggagatccagaagtgaaacgccaggctctctggaggccaggagatgactctgttgacgttcagggatgtggccatagaattctccctggaggagtggaaatgcctggacctcgctcagcagaatttgtacagggatgtgatgttggagaactacagaaacttgttctccgttggtctcactgtctgtaagccaggcctgatcacctgcctggagcaacgaaaagagccctggaatgtgaagagacaggaggcagcagacggacatccagagatgggatttcaccatgctactcaggcttgtcttgaactcctgggctcaagcgatctgcctgcctcagcctcccaaagtgctgggattacaggtgtgaaccaccgtgcccagccaggcctcaatgtttctgtggacaaattcactgcactgtgctcacctggggtgctgcaaactgtgaaatggtttttagagttcagatgcatcttctcactagctatgtcttctcattttacccaagaccttctgccagagcagggcatacaagatgcattcccaaaaagaatactgagaggatatggaaattgtggccttgataatttatatttaaggaaagactgggaaagtttagatgagtgtaagttgcaaaaagattataatggacttaaccaatgttcatcaactacccatagcaaaatctttcaatataataaatatgttaaaatctttgataacttttcaaatttacatagacgtaatataagtaatactggagagaaacctttcaaatgtcaagaatgtggcaaatcctttcaaatgctctcattcctaactgaacatcagaaaattcacactggaaaaaaattccaaaaatgtggagaatgtggcaaaacctttatccagtgctcacactttactgaacctgagaacattgacactggagagaaaccttacaagtgtcaagaatgtaacaacgtcattaaaacttgctcagtccttactaaaaatagaatttatgccggaggggaacattacagatgtgaagaatttggcaaagtatttaaccagtgctcccaccttactgaacatgagcatggtactgaggaaaaaccctgcaaatatgaagagtgcagcagtgtctttatctcttgctcaagcctttctaatcaacagatgattcttgctggagagaagctctccaaatgtgaaacatggtacaaaggttttaaccacagcccaaatccttccaaacaccagagaaatgagattggagggaaacctttcaaatgtgaggaatgtgacagcatcttcaagtggttctcagaccttactaaacataagagaattcacactggtgagaaaccatacaaatgtgacgaatgtgggaaagcctatacacagtcctcacacctcagtgaacacaggaggattcacaccggagagaaaccctaccaatgtgaagaatgtgggaaggtcttcagaacttgctcaagcctttctaaccataagagaactcattctgaagaaaaaccctacacgtgtgaagaatgtggcaacatctttaagcagttatcagacctcactaagcataagaaaacccatactggagagaagccctacaaatgtgacgaatgtggaaaaaactttacccagtcctccaaccttattgtacataagagaattcatactggagagaaaccctacaagtgtgaagaatgtggcagagccttcatgtggttctcagacattaccaaacataagcaaacccatactggagagaaaccctacaaatgtgacgaatgtggcaaaaactttacccagtcctcaaaccttattgtacataagagaattcatactggagagaaaccctacaagtgtgaaaagtgtggcaaagccttcacccagttctcacacctgactgtacatgaaagcattcatacttgagaaaaaaataaacaaatataaaaataggcaaagccgttagtatctgctcgcatcccactttacatcagagttcagacttaataaagttatcataaatgtaattactattgaaagacctttcatgaaatataagtctccagagcacacaagagtatttcttctgaaaaaaatgttacaattatactagatggaagacttgcatcagttgcttaaactttcagaaaatttgtagagaaacccaacaaatctcataaatgtggaataacatttgttcaaaaatgatagcttagaaaacactagagttcatactaaaagatattttgcaaatacactaaatggaaaaataagcaaaatccaatttaagtaaacaatggaggatttgaaggagaaaggaatagagcacggacacgttcagaaatgacactgaatccctgtgttgagtctacagagacatctaga

SEQ ID NO: 2509 - protein, 629 aa, Homo sapiens
MTLLTFRDVAIEFSLEEWKCLDLAQQNLYRDVMLENYRNLFSVGLTVCKPGLITCLEQRKEPWNVKRQEAADGHPEMGFHHATQACLELLGSSDLPASASQSAGITGVNHRAQPGLNVSVDKFTALCSPGVLQTVKWFLEFRCIFSLAMSSHFTQDLLPEQGIQDAFPKRILRGYGNCGLDNLYLRKDWESLDECKLQKDYNGLNQCSSTTHSKIFQYNKYVKIFDNFSNLHRRNISNTGEKPFKCQECGKSFQMLSFLTEHQKIHTGKKFQKCGECGKTFIQCSHFTEPENIDTGEKPYKCQECNNVIKTCSVLTKNRIYAGGEHYRCEEFGKVFNQCSHLTEHEHGTEEKPCKYEECSSVFISCSSLSNQQMILAGEKLSKCETWYKGFNHSPNPSKHQRNEIGGKPFKCEECDSIFKWFSDLTKHKRIHTGEKPYKCDECGKAYTQSSHLSEHRRIHTGEKPYQCEECGKVFRTCSSLSNHKRTHSEEKPYTCEECGNIFKQLSDLTKHKKTHTGEKPYKCDECGKNFTQSSNLIVHKRIHTGEKPYKCEECGRAFMWFSDITKHKQTHTGEKPYKCDECGKNFTQSSNLIVHKRIHTGEKPYKCEKCGKAFTQFSHLTVHESIHT

SEQ ID NO: 2510 - DNA, 2491 bp, Homo sapiens
actgtccgccgccgtgtccgcggctgcgccagacagtgtagaacctgcggcctcgatgtccttctcccgtgccctattgtgggctcggctcccggcggggcgccaggctggccaccgggcagccatctgctctgcccttcgtccccactttgggccctttcccggggttctggggcaagtttctgtccttgccaccgcctcctcctctgcctccggtggctccaaaataccaaacacgtccttgttcgtgcccctgactgtgaaacctcagggccccagcgccgacggcgacgtcggggccgagctaacccggcctctggacaagaatgaagtaaagaaggtcttagacaaattttacaagaggaaagaaattcagaaactgggtgctgattatggacttgatgctcgtctcttccaccaagctttcataagctttagaaattatattatgcagtctcattccctggatgtggacattcacattgttttgaatgatatttgcttcggtgcagctcatgcggatgatttattcccatttttcttgagacatgccaaacaaatatttcctgtgttggactgtaaggatgatctacgtaaaatcagtgacttaagaataccacctaactggtacccagatgctagagccatgcagcggaagataatatttcattcaggccccacaaacagtggaaagacttatcacgcaatccagaaatacttctcagcaaagtctggagtgtattgtggccctctaaaattactggcacatgagatcttcgaaaagagtaatgctgctggtgtgccatgtgacttggtgacaggtgaagagcgtgtgacagttcagccaaatgggaaacaggcttcacatgtttcttgtacagttgagatgtgcagtgttacaactccttatgaagtggctgtaattgatgaaattcaaatgattagagatccagccagaggatgggcctggaccagagcacttctaggactgtgtgctgaagaggttcatttgtgtggagaacctgctgctattgacctggtgatggagcttatgtacacaacgggggaggaagtggaggttcgagactataagaggcttacccccatttctgtgctggaccatgcactagaatctttagataaccttcggcctggggactgcattgtctgttttagcaagaatgatatttattctgtgagtcggcagattgaaattcggggattagaatcagctgttatatatggcagtctcccacctgggaccaaacttgctcaagcaaaaaagtttaatgatcccaatgacccatgcaaaatcttggttgctacagatgcaattggcatgggacttaatttgagcataaggagaattattttttactcccttataaagcccagtatcaatgaaaagggagagagagaactagaaccaatcacaacctctcaagccctgcagattgctggcagagctggcagattcagctcacggtttaaagaaggagaggttacaacaatgaatcatgaagatctcagtttattaaaggaaattttgaagaggcctgtggatcctataagggcagctggtcttcatccaactgctgagcagattgaaatgtttgcctaccatctccctgatgcaacactgtccaatctcattgatatttttgtagacttttcacaagttgatgggcagtattttgtctgcaatatggatgattttaaattttctgcagagttgatccagcatattccactaagtctgcgagtgaggtatgttttctgcacagctcctatcaacaagaagcagccttttgtgtgttcttcactgttacagtttgccaggcagtatagcaggaatgagcccctgacctttgcatggttacgccgatacatcaaatggcctttacttccacctaagaatattaaagacctcatggatcttgaagctgtccacgatgtcttggatctttacttgtggctaagctaccgatttatggatatgtttccagatgccagccttattcgagatctccagaaagaactagatggtattatccaagatggtgtgcacaatatcactaaattgattaaaatgtctgagacgcataagctgttgaatttggagggctttccatcagggagccagtcacgattgtcaggaaccttaaagagccaagctagaaggacacgcggcaccaaagctctagggagtaaagctactgagccacccagccccgatgcaggagagctgtcccttgcttccagattggtgcagcaaggactcctcactccagacatgctgaaacagctagaaaaagagtggatgacacaacaaactgaacacaacaaagaaaaaacagagtctgggactcatccaaaagggacgagaagaaagaagaaggaacctgattcggactagttttctgttcctgtttttttttttttatttaattttgcaaataaaaatttattttgaagaaaaaaaaaaaaaaaa

SEQ ID NO: 2511 - protein, 786 aa, Homo sapiens
MSFSRALLWARLPAGRQAGHRAAICSALRPHFGPFPGVLGQVSVLATASSSASGGSKIPNTSLFVPLTVKPQGPSADGDVGAELTRPLDKNEVKKVLDKFYKRKEIQKLGADYGLDARLFHQAFISFRNYIMQSHSLDVDIHIVLNDICFGAAHADDLFPFFLRHAKQIFPVLDCKDDLRKISDLRIPPNWYPDARAMQRKIIFHSGPTNSGKTYHAIQKYFSAKSGVYCGPLKLLAHEIFEKSNAAGVPCDLVTGEERVTVQPNGKQASHVSCTVEMCSVTTPYEVAVIDEIQMIRDPARGWAWTRALLGLCAEEVHLCGEPAAIDLVMELMYTTGEEVEVRDYKRLTPISVLDHALESLDNLRPGDCIVCFSKNDIYSVSRQIEIRGLESAVIYGSLPPGTKLAQAKKFNDPNDPCKILVATDAIGMGLNLSIRRIIFYSLIKPSINEKGERELEPITTSQALQIAGRAGRFSSRFKEGEVTTMNHEDLSLLKEILKRPVDPIRAAGLHPTAEQIEMFAYHLPDATLSNLIDIFVDFSQVDGQYFVCNMDDFKFSAELIQHIPLSLRVRYVFCTAPINKKQPFVCSSLLQFARQYSRNEPLTFAWLRRYIKWPLLPPKNIKDLMDLEAVHDVLDLYLWLSYRFMDMFPDASLIRDLQKELDGIIQDGVHNITKLIKMSETHKLLNLEGFPSGSQSRLSGTLKSQARRTRGTKALGSKATEPPSPDAGELSLASRLVQQGLLTPDMLKQLEKEWMTQQTEHNKEKTESGTHPKGTRRKKKEPDSD

SEQ ID NO: 2512 - DNA, 1738 bp, Homo sapiens
tgctgactaatccgcgggccgcggggaatgggtggcgcgccagccggtcggcaggggtcacgcggccgggtgtgcgcggaatggattcagggttctcgggtcgcgcccgggagctagagtcctgactcccagccggggtccccgaccggcctttcggggttgccgggcgcgctctgcaaaggggaaactgaggcccaaggaaattgagtatctctgcaaagtcaccagctgagttcgaaccagacagatcctgggaccccctactctatccgccaccggaagaatctccgtccttgtctttccattctgccctcccggcttcccagtaagcacacagccccaggaccacccttgaccgtcctcaaccaagcgatgcatgccaggggcccccatggccaactgtccccagcactgcctctggcctcctcagtcctgatgctgctgatgagcaccctgtggctggtgggggccggccccggcctggtcctggccccggagctgttgctggacccctggcaggtgcaccggctgctgacccatgccctgggccacacggccctgccaggcctgctcctgagcctgctgctcctgcccactgtgggctggcagcaggagtgccacctgggcacgctgagattcctgcatgcctcagccctgctcgccctggcttctgggctgctggcagtgctgctggcaggccttgggctgtccagtgcagccggcagctgtggatacatgcctgtccacctggccatgctggctggggagggacaccgccctagacggccccgtggggcactgccaccgtggctgtcgccgtggctgctgcttgccctgaccccactgctcagctctgagccacccttcctgcagctcctttgcggcctccttgccggcctggcctatgcagctggggccttccggtggctggaaccctcagagcgacggctgcaggtgctgcaggagggcgtcttgtgcaggaccttggcggggtgctggcccctgaggctccttgccaccccgggtagcctggcggagctgcctgtcacccatcctgccggagtgaggcctcccatccctggaccgccttatgtggcctcccctgacctctggtcccactgggaagactcagccctgcccccaccaagcctgaggcctgtgcagcccacctgggagggctcctcagaggcaggcctggactgggctggggccagcttctccccagggactccgatgtgggcggccttggatgagcagatgctgcaggagggcatccaggcctcgcttcttgacgggccagcccaggaaccccagagcgcaccatggctgtccaagtcctctgtctcctctctgcggctgcagcagctggagcgcatgggcttccctacggagcaggcggtggtggcactggcagccacaggccgtgtggagggtgccgtgtcactgttggttggaggacaagtgggcactgagaccctggtgacccatggaaagggtgggcctgcccactccgagggtcctgggcctccctagcccaggcagagagtggggcacaggcaggcccttgggtgctaagggctgggctgcatgtgggtagcccgagctcctactctgtctaaagagggccacagtggggagcaggggcacctctggaggcaggagaggccccccagcatgctgccctagtacgtgtttagaataaaaaccagtttgtttttcaacctggacctccttggag

SEQ ID NO: 2513 - protein, 386 aa, Homo sapiens
MHARGPHGQLSPALPLASSVLMLLMSTLWLVGAGPGLVLAPELLLDPWQVHRLLTHALGHTALPGLLLSLLLLPTVGWQQECHLGTLRFLHASALLALASGLLAVLLAGLGLSSAAGSCGYMPVHLAMLAGEGHRPRRPRGALPPWLSPWLLLALTPLLSSEPPFLQLLCGLLAGLAYAAGAFRWLEPSERRLQVLQEGVLCRTLAGCWPLRLLATPGSLAELPVTHPAGVRPPIPGPPYVASPDLWSHWEDSALPPPSLRPVQPTWEGSSEAGLDWAGASFSPGTPMWAALDEQMLQEGIQASLLDGPAQEPQSAPWLSKSSVSSLRLQQLERMGFPTEQAVVALAATGRVEGAVSLLVGGQVGTETLVTHGKGGPAHSEGPGPP

SEQ ID NO: 2514 - DNA, 1750 bp, Homo sapiens
caccgcgcaagcgcatcctggcctttcttcagtccccacgtgcgatccttcccggcaactttttcgagaaaaatgcccaaattcaaggcggcccgtggggtggggggtcaggaaaaacatgcgcccctggccgatcagatcctggctgggaatgcggtgcgggcgggggtccgggagaagcggcggggtcgcgggacaggagaagcggaggaagagtatgtggggccccggctgagccgacggattttgcagcaagcacggcagcaacaggaggaactcgaggccgagcatgggactggggacaagcccgcggcgccgcgggaacgcaccacgcggctgggtccaagaatgcctcaggatggatcagatgacgaggacgaggagtggcccaccctggagaaggctgccacaatgacagcagcgggccatcatgcagaggtggttgtggaccctgaggatgagcgtgccatagagatgttcatgaacaagaaccctcctgccaggcgcaccctggctgacatcatcatggagaagctgactgagaagcagacagaggttgagacagtcatgtcagaggtgtcgggcttccctatgccccagctggacccccgggtcctagaagtgtacaggggggtccgggaggtattatctaagtaccgcagtggaaaactgcccaaggcatttaagatcatccctgcactctccaactgggagcaaatcctctacgtcacagagccggaggcctggactgcagctgccatgtaccaggccaccaggatttttgcctctaacctgaaggaacgcatggcccagcgcttctacaaccttgtcctgctccctcgagtacgagatgacgttgctgaatacaaacgactcaacttccatctctacatggctctcaagaaggcccttttcaaacctggagcctggttcaaagggatcctgattccactgtgcgagtctggcacttgtaccctccgggaagccatcattgtgggtagcatcatcaccaagtgctccatccctgtgttgcactccagtgcggccatgctgaaaattgctgagatggaatacagcggtgccaacagcatcttcctgcgactgctgctggataagaagtatgcactgccttaccgggtgctggatgccctagtcttccacttcctggggttccggacagagaagcgtgaactgcctgtgctgtggcaccagtgcctcctgactttggtccagcgctacaaggccgacttggccacagaccagaaagaggccctcttagaactgctccggctgcagccccatccacagctatcgcccgaaatcaggcgtgagcttcagagtgcagtcccccgcgatgtggaagatgttcccatcaccgtggagtgaggaaaacagtcagctgtcctggccaaaggggtttggaaggacaccaagacccccgttggtgactgaagatgacactgagctttaatggctgaagacccagatcagggcagtgacagatcacagggacatctgtggctcccagtccaggacaggaaggactgagggtctggctggttccctcttccattctaggcccttatccctgtttagttctgagagccaacttgagataccatatgctagcattcccagtccccagctggggcttggtgtgagtactttttctatggctattgtgtcaggtcactgtggataaaggcaaagacagatatttattgaaaaaaaaaaaaaaaaaaaaaaaaaa

SEQ ID NO: 2515 - protein, 301 aa, Homo sapiens
MNKNPPARRTLADIIMEKLTEKQTEVETVMSEVSGFPMPQLDPRVLEVYRGVREVLSKYRSGKLPKAFKIIPALSNWEQILYVTEPEAWTAAAMYQATRIFASNLKERMAQRFYNLVLLPRVRDDVAEYKRLNFHLYMALKKALFKPGAWFKGILIPLCESGTCTLREAIIVGSIITKCSIPVLHSSAAMLKIAEMEYSGANSIFLRLLLDKKYALPYRVLDALVFHFLGFRTEKRELPVLWHQCLLTLVQRYKADLATDQKEALLELLRLQPHPQLSPEIRRELQSAVPRDVEDVPITVE

SEQ ID NO: 2516 - DNA, 5659 bp, Homo sapiens
tttttttttttttttttcctaatttttggtcggcggcggtgctgggccaggggaaggaagggacacggaggccgccctcgtcccgccacctcctacccgcttccccccagccccggctccgggagatgtgccgggcggggggcccgggttcgccgagccgcaggagagacacgctgggccgaccccagagaggcgctggacaggctggtggtccaggccgtggtgcctgccaggtgatgtggggcaaagccccccgcacaggccactgagagctccggacacgcacccggctgccaccatggcccgcctagccgcagtgctctggaatctgtgtgtcaccgccgtcctggtcacctcggccacccaaggcctgagccgggccgggctcccgttcgggctgatgcgccgggagctggcgtgtgaaggctaccccatcgagctgcggtgccccggcagcgacgtcatcatggtggagaatgccaactacgggcgcacggacgacaagatttgcgatgctgaccctttccagatggagaatgtgcagtgctacctgccggacgccttcaagatcatgtcacagaggtgtaacaaccgcacccagtgcgtggtggtcgccggctcggatgcctttcctgacccctgtcctgggacctacaagtacctggaggtgcagtacgactgtgtcccctacaaagtggagcagaaagtcttcgtgtgcccagggaccctgcagaaggtgctggagcccacctcgacacacgagtcagagcaccagtctggcgcatggtgcaaggacccgctgcaggcgggtgaccgcatctacgtgatgccctggatcccctaccgcacggacacactgactgagtatgcctcgtgggaggactacgtggccgcccgccacaccaccacctaccgcctgcccaaccgcgtggatggcacaggctttgtggtctacgatggtgccgtcttctacaacaaggagcgcacgcgcaacatcgtcaagtatgacctacggacgcgcatcaagagcggggagacggtcatcaataccgccaactaccatgacacctcgccctaccgctggggcggaaagaccgacattgacctggcggtggacgagaacgggctgtgggtcatctacgccactgagggcaacaacgggcggctggtggtgagccagctgaacccctacacactgcgctttgagggcacgtgggagacgggttacgacaagcgctcggcatccaacgccttcatggtgtgtggggtcctgtacgtcctgcgctccgtgtacgtggatgatgacagcgaggcggctggcaaccgcgtggactatgccttcaacaccaatgccaaccgcgaggagcctgtcagcctcaccttccccaacccctaccagttcatctcctccgttgactacaaccctcgcgacaaccagctgtacgtctggaacaactatttcgtggtgcgctacagcctggagttcgggccgcccgaccccagtgctggcccagccacttccccacccctcagcacgaccaccacagccaggcccacgcccctcaccagcacagcctcgcccgcagccaccaccccgctccgccgggcacccctcaccacgcacccagtgggtgccatcaaccagctgggacctgatctgcctccagccacagccccagtccccagcacccggcggcccccagccccgaatctacacgtgtcccctgagctcttctgcgagccccgagaggtacggcgggtccagtggccggccacccagcagggcatgctggtggagaggccctgccccaaggggactcgaggaattgcctccttccagtgtctaccagccttggggctctggaacccccggggccctgacctcagcaactgcacctccccctgggtcaaccaggtggcccagaagatcaagagtggggagaacgcggccaacatcgccagcgagctggcccgacacacccggggctccatctacgcgggggacgtctcctcctctgtgaagctgatggagcagctgctggacatcctggatgcccagctgcaggccctgcggcccatcgagcgcgagtcagccggcaagaactacaacaagatgcacaagcgagagagaacttgtaaggattatatcaaggccgtggtggagacagtggacaatctgctccggccagaagctctggagtcctggaaggacatgaatgccacggagcaggtgcacacggccaccatgctcctcgacgtcctggaggagggcgccttcctgctggccgacaatgtcagggagcctgcccgcttcctggctgccaaggagaacgtggtcctggaggtcacagtcctgaacacagagggccaggtgcaggagctggtgttcccccaggaggagtacccgagaaagaactccatccagctgtctgccaaaaccatcaagcagaacagccgcaatggggtggtcaaagttgtcttcatcctctacaacaacctgggcctcttcctgtccacggagaatgccacagtgaagctggccggcgaagcaggcccgggtggccctgggggcgcctctctagtggtgaactcacaggtcatcgcagcatccatcaacaaggagtccagccgcgtcttcctcatggaccctgtcatcttcaccgtggcccacctggaggacaagaaccacttcaatgctaactgctccttctggaactactcggagcgttccatgctgggctattggtcgacccaaggctgccgcctggtggagtccaacaagacccataccacgtgtgcctgcagccacctcaccaacttcgctgtgctcatggctcaccgtgagatctaccagggccgcatcaacgagctgctgctgtcggtcatcacctgggtgggcattgtgatctccctggtctgcttggccatctgcatctccaccttctgcttcctgcgggggctgcagaccgaccgcaacaccatccacaagaacctgtgcatcaacctcttcctggctgagctgctcttcctggtcgggatcgacaagactcagtatgagattgcctgccccatcttcgccggcctgctgcactatttcttcctggctgccttctcctggctgtgcctggagggcgtgcacctctacctgctactagtggaggtgtttgagagcgagtattcccgcaccaagtactactacctgggtggctactgcttcccggccctggtggtgggcatcgcggctgccattgactaccgcagctacggcaccgagaaggcctgctggctccgagtggacaattacttcatctggagtttcatcgggccagtctccttcgttatcgtggtcaacctggtgttcctcatggtgaccctgcacaagatgatccgaagctcatctgtgctcaagcccgactccagccgcctggacaacattaaatcctgggcgctgggggccatcgcgctgctgttcctgctgggcctcacctgggctttcggcctcctcttcatcaacaaggagtcggtggtcatggcctatctcttcaccaccttcaacgccttccagggggtcttcatcttcgtctttcactgcgccttacagaagaaggtgcacaaggagtacagcaagtgcctgcgtcactcctactgctgcatccgctccccacccgggggcactcacggatccctcaagacctcagccatgcgaagcaacacccgctactacacagggacccagagccgaattcggaggatgtggaatgacactgtgaggaaacagacggagtcctccttcatggcgggtgacatcaacagcacccccaccctgaaccgaggtaccatggggaaccacctgctgaccaaccccgtgctgcagccccgtgggggcaccagtccctacaacaccctcatcgccgagtcagtgggcttcaatccctcctcgccccctgtcttcaactccccagggagctaccgggaacccaagcaccccttgggaggccgggaagcctgtggcatggacaccctgcccctgaacggcaacttcaataacagttactccttgcgaagtggggatttccctcccggggatgggggccctgagccgccccgaggccggaacctagccgatgcggcggcctttgagaagatgatcatctcagagctggtgcacaacaacctgcgggggagcagcagcgcggccaagggccctccaccgcctgagccccctgtgccacctgtgccagggggcgggggcgaggaagaggcgggcgggcccgggggtgctgaccgggccgagattgaacttctctataaggccctggaggagcctctgctgctgccccgggcccagtcggtgctgtaccagagcgatctggacgagtcggagagctgcacggccgaggacggcgccaccagccggcccctctcctcccctcctggccgggactccctctatgccagcggggccaacctgcgggactcaccctcctacccggacagcagccctgaggggcccagtgaggccctgcccccaccccctcccgcaccccccggcccccccgaaatctactacacctcgcgcccgccagccctggtggcccggaatcccctgcagggctactaccaggtgcggcgtcctagccacgagggctacctggcagccccaggccttgaggggccagggcccgatggggacgggcagatgcagctggtcaccagtctctgagggcacctcatggaccaggggctggtggcccaggccagggagggaaccctgggcagggctctggtgggagagggagacagatggaggcagtggctggtgggccactctctccaggtgcccctcagccatgggccctacagtcccctcaggggactctaacctgggggcctgaggtgccagggttcacagacagggtttcccaccagccacacgcaccagctctatttgggggaagtgtagtgaggaggagcccagaggaccccaggggagtgaggagggagaacttggaagggtgcagcccacttccagactctcccctctcccacccttctaccctgtgaagggaaatgagggctttagtttcctgggcagggaggggcagcttctgaggttgccaaaggcccccactggatggaacctgttagctgctcctctccgcagccagaaatgctgccggctgcacccagagggagcagtgaggcaggacagatggacaggttcctcctgcgctgtaattccctgctccctggagactgggaaaaggccgcagggcagggggactgggcggtggtggctggtggtttaaaggttgaactttctctgaagctcctttccccttgctcttggtccctgccccgcaagcaaacctgccccctctgcctcccagtgcacccaatgaccccctcccttggggcgactcctgatgaagcacaactccccgcagggcccccagcccacaggggtggccatatttgggcagttcccagtcctgtgggctcggctatctggggagcagattttgggtctggatctccctggggagtgggtcctgggcttggatctttccctagggggccctcttactccttcctctctcctcctccttccccattgctgtaaatatttcaacgaaatggaaaagaaaaaaaaaaagac

SEQ ID NO: 2517 - protein, 1474 aa, Homo sapiens
MARLAAVLWNLCVTAVLVTSATQGLSRAGLPFGLMRRELACEGYPIELRCPGSDVIMVENANYGRTDDKICDADPFQMENVQCYLPDAFKIMSQRCNNRTQCVVVAGSDAFPDPCPGTYKYLEVQYDCVPYKVEQKVFVCPGTLQKVLEPTSTHESEHQSGAWCKDPLQAGDRIYVMPWIPYRTDTLTEYASWEDYVAARHTTTYRLPNRVDGTGFVVYDGAVFYNKERTRNIVKYDLRTRIKSGETVINTANYHDTSPYRWGGKTDIDLAVDENGLWVIYATEGNNGRLVVSQLNPYTLRFEGTWETGYDKRSASNAFMVCGVLYVLRSVYVDDDSEAAGNRVDYAFNTNANREEPVSLTFPNPYQFISSVDYNPRDNQLYVWNNYFVVRYSLEFGPPDPSAGPATSPPLSTTTTARPTPLTSTASPAATTPLRRAPLTTHPVGAINQLGPDLPPATAPVPSTRRPPAPNLHVSPELFCEPREVRRVQWPATQQGMLVERPCPKGTRGIASFQCLPALGLWNPRGPDLSNCTSPWVNQVAQKIKSGENAANIASELARHTRGSIYAGDVSSSVKLMEQLLDILDAQLQALRPIERESAGKNYNKMHKRERTCKDYIKAVVETVDNLLRPEALESWKDMNATEQVHTATMLLDVLEEGAFLLADNVREPARFLAAKENVVLEVTVLNTEGQVQELVFPQEEYPRKNSIQLSAKTIKQNSRNGVVKVVFILYNNLGLFLSTENATVKLAGEAGPGGPGGASLVVNSQVIAASINKESSRVFLMDPVIFTVAHLEDKNHFNANCSFWNYSERSMLGYWSTQGCRLVESNKTHTTCACSHLTNFAVLMAHREIYQGRINELLLSVITWVGIVISLVCLAICISTFCFLRGLQTDRNTIHKNLCINLFLAELLFLVGIDKTQYEIACPIFAGLLHYFFLAAFSWLCLEGVHLYLLLVEVFESEYSRTKYYYLGGYCFPALVVGIAAAIDYRSYGTEKACWLRVDNYFIWSFIGPVSFVIVVNLVFLMVTLHKMIRSSSVLKPDSSRLDNIKSWALGAIALLFLLGLTWAFGLLFINKESVVMAYLFTTFNAFQGVFIFVFHCALQKKVHKEYSKCLRHSYCCIRSPPGGTHGSLKTSAMRSNTRYYTGTQSRIRRMWNDTVRKQTESSFMAGDINSTPTLNRGTMGNHLLTNPVLQPRGGTSPYNTLIAESVGFNPSSPPVFNSPGSYREPKHPLGGREACGMDTLPLNGNFNNSYSLRSGDFPPGDGGPEPPRGRNLADAAAFEKMIISELVHNNLRGSSSAAKGPPPPEPPVPPVPGGGGEEEAGGPGGADRAEIELLYKALEEPLLLPRAQSVLYQSDLDESESCTAEDGATSRPLSSPPGRDSLYASGANLRDSPSYPDSSPEGPSEALPPPPPAPPGPPEIYYTSRPPALVARNPLQGYYQVRRPSHEGYLAAPGLEGPGPDGDGQMQLVTSL

SEQ ID NO: 2518 - DNA, 7060 bp, Homo sapiens
atggcaggaaacagccttgttctacccattgttctttggggtcgaaaagcgcccacacattgcatctcagccgtacttttaacagatgatggggccacgatcgtaacaggatgtcacgacggacaaatatgtctctgggatctttcagtagaactgcaagttaatcctcgagcactgttgtttggtcatacagcatcaatcacttgtttgtctaaagcttgtgcttccagtgacaaacagtatattgtgagtgcatctgaaagtggagagatgtgcctctgggatgtgagtgatggcagatgtattgaatttacaaaattagcttgcacacatactggcatacagttctaccagttctctgttgggaatcagcgagaaggaaggcttttatgccacggacattaccctgaaatccttgttgtggatgctaccagccttgaagtattatactccttagtatcaaagatatcaccagactggattagctccatgagtattattcgatcccaccgaacacaagaggacacagtggtagcactctcggtgactggcatcctgaaggtctggattgttacctcggaaataagtgacatgcaggatactgagccaatatttgaggaggaatccaaaccaatttattgtcagaattgccaaagcatctctttttgtgcatttacacaaaggtcacttttggttgtgtgttccaaatattggagggtgttcgatgccggagactattccttgttgtgttcaggtcctagtgaaaatggacagacatggaccgggggggactttgtctcatcagataaagtcatcatttggacagaaaatgggcaaagttatatttacaaactacctgccagttgccttccagctagtgattcattccgcagtgatgtggggaaggcagttgaaaatttaattcctcctgtacaacatatcctcttggatcgaaaagataaagagttgctaatttgtcctcctgttactcggttcttctatggatgcagagaatatttccataaactgttaattcagggtgattcttctggaaggttgaatatttggaacatatcagacacagctgataaacagggaagtgaagaagggctggcaatgacaacttctattagtttgcaagaggcatttgataaactgaatccttgtcctgctggaattatagatcagctgagtgtgattcccaatagtaatgaacctcttaaagtaactgcaagtgtgtacataccagcacatggacgacttgtttgtggtcgtgaagatggaagcatagttattgtacctgccacacagacggccatagtacagctgttgcaaggggaacacatgctcagaagaggttggccacctcacagaacactccgtggtcatcggaacaaagtcacatgtttgctatatcctcatcaggtctcagctcggtatgatcaaagatacctgatatctggaggtgtggatttttcagtcataatttgggacatattttctggagaaatgaaacatatcttctgtgttcatggtggtgagattactcaacttctagttccacctgaaaactgtagtgcaagagtacagcactgcatctgctctgtagccagtgaccactcagtaggacttctaagtttgcgagagaaaaaatgcataatgttggcatctcgtcacctttttcctattcaagtaatcaaatggaggccttctgatgattacctggtggtggggtgttcagatggttctgtgtacgtctggcaaatggatactggtgcattggatcgttgtgtgatggggataacagcagttgagattctaaacgcttgtgatgaagctgttcctgctgctgttgattcacttagtcatccagcagtcaacctaaaacaagctatgacgagacgtagtcttgctgctcttaaaaatatggcccatcataagctacaaacccttgcaactaacctcttggcttctgaggcatctgacaagggaaatttacctaaatattctcataactccctgatggttcaagcaataaagacaaacctaacagacccggacatacatgtgctattctttgatgtggaagcgttgattattcaactcctgactgaagaagcctctaggccgaatactgctcttatttccccagagaatttgcaaaaagcatctggcagttcagacaaagggggctcttttttaactggaaaacgagcagcagttctcttccaacaagtgaaagaaacgatcaaagagaacatcaaggaacacctccttgatgatgaagaggaggatgaggagataatgaggcagagaagggaagaaagtgatcctgaatatcggtccagcaaatcaaagccattgaccctattagaatataatttaactatggacactgcaaagctgtttatgtcctgccttcacgcctggggtttgaatgaagtactggatgaagtttgcctggatcgccttggaatgctgaaaccccactgcaccgtatcgtttggcctcttgtcaagaggaggccatatgtcactgatgctgccgggttataatcagcctgcttgtaaactgtcacatgggaaaacagaagtaggaaggaagctgccagcgtctgagggagtaggaaagggaacttacggagtgtcccgtgccgtcaccacacagcatctcctgtctatcatttctttggcaaatactttaatgagtatgaccaatgcaacttttattggtgatcatatgaagaagggtcctaccaggccacctagaccaagcaccccagacctttctaaggcaaggggttcccctccaacttccagtaatattgtgcaaggacagattaaacaagttgctgcacctgtcgtttccgctcggtctgatgctgatcactctggctctgaccctccttctgctcctgctttacatacctgtttcttagtaaatgaaggttggagtcagttagctgctatgcactgtgttatgctgccagacctactgggattggataaatttaggcctccccttctggagatgctggcccgaagatggcaagatcgatgcttggaggtgagagaagccgcgcaggccctgcttctggcggaactgagaagaattgagcaggcaggcaggaaggaagccattgatgcctgggctccttacttacctcagtacatagaccacgtcatatcacctggagtcacatcagaagccgcgcagactatcaccacggctcctgatgcctcagggcctgaagcaaaagtccaggaggaagagcatgaccttgttgacgatgacatcaccactggttgcttatcaagtgtcccacaaatgaaaaaaatttctacatcttacgaggaaagacggaagcaagctaccgctattgttttacttggagtaataggagctgaatttggtgctgaaattgaacctcctaaactattgaccagacctcgaagctctagccaaattcctgagggattcgggttgactagtggtggatccaactactcgctggccagacatacttgcaaggcactgacgtttcttctgctacagcctccaagccccaaacttcctccacacagcactatccgaagaacagccattgatctgattggacgtgggttcactgtttgggagccttacatggatgtgtccgctgttctgatggggcttctcgaactttgtgccgatgccgagaaacaacttgccaacatcacaatggggttgcctctgagcccagcagctgactcggcccgctctgcgaggcatgccctctcgctcattgccaccgccagaccacccgccttcatcaccaccatagccaaagaggtacacagacatacggctcttgcagcaaatacccaatcacagcagaatatgcacacaacaactcttgcacgagctaaaggggaaattttgagagtcattgaaattcttattgaaaagatgcccacagatgttgtggatcttctcgtggaggttatggacatcattatgtactgccttgaaggatctttagttaaaaagaaaggtcttcaagaatgtttcccagccatctgcaggttctacatggtcagctattatgagcggaatcacagaatagcagttggagctcgccatggttcagtggccctgtacgacatccggactggaaaatgtcagacaatccatggacacaagggaccaatcactgcagtggcttttgctcctgatggaagatatcttgccacctactcaaacactgacagccacatttctttttggcagatgaacacgtcactgctgggaagcatcggcatgctgaactcggcacctcagctgcgctgcattaaaacctaccaggtgccccctgtgcagcccgcgtcccccggctcccacaatgccctcaagctggcccggctcatctggacttccaaccgcaacgtcatcctcatggcccatgacgggaaggagcaccgcttcatggtctaatgctgctgcctgccgccgtgactgcgttttagttctctaaattatccaagccgatgttgctctgtccttcctcacaccagattgttcccaggggcctgcccaccccagtgccatccagtggcacggccggccgggtcttgtcacttgtgcatgcttctcaggggcagaacccgctcgtgccatctgtcgattcagaggcacgcacacatgctctgcaggatgtggccatcctgtcaccaggtagtttttccctgccagagatggcaggggaaagccagcggttcctgggaacgctcttgttgcttggtgcaacagaagcacaaaaatcaataaacactgtgattgcactcccagcccagatcagcatttttagccatctcaaccgcacctctgaagtgctgcttgaatctggccgttctgacactgggtgttgaggtcatgtggcagtcctcacgattgaaattattgccctttgaattacctaaaatattgtttaccaaaaagattctgtgtttacatgttcttttcttctggtgattgctaggaaattactcaatccaatttcctagggtttagctaccaccttctttatcaacagctaaccaatttgagattcatgattaattatgtacacaaaaatattttccttgtagaaaatagttttccagacacttagccttctgaagtgctcatctcttgcttaaatgatagtctatttagtagtttaaaataaaaataatcactccctatgatctagttaatgtaattatccagtcactgtaactaatctcttgaagggacttttgtgataaagagccaagttcagaagcatagcgtgtaccgaaaatgaagactctcctatctactgctacagatcctgttgaagaaagagcttacccctttcccccggaaaacttgcaatcctgtagttcccatatgtgtggcatatgtcagttatgaaattattataattcagccttcaaactactactgatcaactaaaggaaagctaataaggtatttcttttaaacaagtattctggaaaagtaataactatggcacaaatgttcaggagtgtatataaaaatatgtgggctctcgatttatttgagcaaacattgcaatgagggtgttcattatgcttctaagtaagctttaactagaccactttcttcttatgtcagattgtgctggttctagctcataataatgaaaaaaatagaattatattttgtatgaattgtttctaacaaaccttgatctgtatatacttgtgaggggttgtttggttgcctaattgttgattggttggttagttgggcaaaatcatttattacatgcaaaaatagaaaattatttgttaaattcagagaaaatatgtgaagtttacaaaggaaccaaaatgataatgggagaatttagtcttaaaagtttaggttgtcagagtttatctgatatacaaaaaagtaggatcaaagtctaggaacaaacattggttatttcactgaaacagatttttaaagagcatattaagaaattaagaccattagatcatctctttcataatgatatgatgttatttccattgacggcaaatctatactgttccttggttttagagttgggtattctttcaaaagtgaatttaggcacatgcatgtacattgtatttataaagattatatatgtagtttccaaggaagaaacaaagacctatacagtttagactttatttgtttggtgaacgtgctgttgtgtttggcatagctagagaaatgtaaggtaaaaggctcactttgttttccagtgggtccagagtcttctctatacccaacatatgtttactttatgaacttaaatggaaattaatttattgtagactacatctctatttggaatgatgaggtaaatgtataccttagcattttctttaacaaaaatgttctgtgtgtcaggaaagaggtgtgagagcggtaggcagcctgccgcaaacacacggatggctccccccgccacgaaggttgagaacaaagccagggggcccagaggagcaatagccctgggccacaagcgtgggtaggcctttcacgtattccgtctgcacaggcaaccaaggccagtagaaagctatggctgcaaaaccctggggtggacgatgtttgatgattagacggtcatctctaactactaaactaatatctgcattcttgttaacataaatctctccttggctattttaatagccacagtcccaaacttcatcccagcttagatttctcagcactgaggtaaactctgcattgtcatcccagcgtacacctttaatgttttattgattttactggcactgtatttggacctgtccttgtatatgtagagacatatgtggcttcattggtaatttacaagcaaaagatgacatgacgtgacacctgtatgaaaatgtgatgattgaactccctgtgtacagcgagtgaattaaaatgtctgcctctccagacatttcttaatgattccacttaatagactctatgtgtgctgaatgttcctgtgtacatatgtgtgttaaataaaacaattgtattg

SEQ ID NO: 2519 - protein, 1490 aa, Homo sapiens
MAGNSLVLPIVLWGRKAPTHCISAVLLTDDGATIVTGCHDGQICLWDLSVELQVNPRALLFGHTASITCLSKACASSDKQYIVSASESGEMCLWDVSDGRCIEFTKLACTHTGIQFYQFSVGNQREGRLLCHGHYPEILVVDATSLEVLYSLVSKISPDWISSMSIIRSHRTQEDTVVALSVTGILKVWIVTSEISDMQDTEPIFEEESKPIYCQNCQSISFCAFTQRSLLVVCSKYWRVFDAGDYSLLCSGPSENGQTWTGGDFVSSDKVIIWTENGQSYIYKLPASCLPASDSFRSDVGKAVENLIPPVQHILLDRKDKELLICPPVTRFFYGCREYFHKLLIQGDSSGRLNIWNISDTADKQGSEEGLAMTTSISLQEAFDKLNPCPAGIIDQLSVIPNSNEPLKVTASVYIPAHGRLVCGREDGSIVIVPATQTAIVQLLQGEHMLRRGWPPHRTLRGHRNKVTCLLYPHQVSARYDQRYLISGGVDFSVIIWDIFSGEMKHIFCVHGGEITQLLVPPENCSARVQHCICSVASDHSVGLLSLREKKCIMLASRHLFPIQVIKWRPSDDYLVVGCSDGSVYVWQMDTGALDRCVMGITAVEILNACDEAVPAAVDSLSHPAVNLKQAMTRRSLAALKNMAHHKLQTLATNLLASEASDKGNLPKYSHNSLMVQAIKTNLTDPDIHVLFFDVEALIIQLLTEEASRPNTALISPENLQKASGSSDKGGSFLTGKRAAVLFQQVKETIKENIKEHLLDDEEEDEEIMRQRREESDPEYRSSKSKPLTLLEYNLTMDTAKLFMSCLHAWGLNEVLDEVCLDRLGMLKPHCTVSFGLLSRGGHMSLMLPGYNQPACKLSHGKTEVGRKLPASEGVGKGTYGVSRAVTTQHLLSIISLANTLMSMTNATFIGDHMKKGPTRPPRPSTPDLSKARGSPPTSSNIVQGQIKQVAAPVVSARSDADHSGSDPPSAPALHTCFLVNEGWSQLAAMHCVMLPDLLGLDKFRPPLLEMLARRWQDRCLEVREAAQALLLAELRRIEQAGRKEAIDAWAPYLPQYIDHVISPGVTSEAAQTITTAPDASGPEAKVQEEEHDLVDDDITTGCLSSVPQMKKISTSYEERRKQATAIVLLGVIGAEFGAEIEPPKLLTRPRSSSQIPEGFGLTSGGSNYSLARHTCKALTFLLLQPPSPKLPPHSTIRRTAIDLIGRGFTVWEPYMDVSAVLMGLLELCADAEKQLANITMGLPLSPAADSARSARHALSLIATARPPAFITTIAKEVHRHTALAANTQSQQNMHTTTLARAKGEILRVIEILIEKMPTDVVDLLVEVMDIIMYCLEGSLVKKKGLQECFPAICRFYMVSYYERNHRIAVGARHGSVALYDIRTGKCQTIHGHKGPITAVAFAPDGRYLATYSNTDSHISFWQMNTSLLGSIGMLNSAPQLRCIKTYQVPPVQPASPGSHNALKLARLIWTSNRNVILMAHDGKEHRFMV

SEQ ID NO: 2520 - DNA, 6961 bp, Homo sapiens
atggcaggaaacagccttgttctacccattgttctttggggtcgaaaagcgcccacacattgcatctcagccgtacttttaacagatgatggggccacgatcgtaacaggatgtcacgacggacaaatatgtctctgggatctttcagtagaactgcaagttaatcctcgagcactgttgtttggtcatacagcatcaatcacttgtttgtctaaagcttgtgcttccagtgacaaacagtatattgtgagtgcatctgaaagtggagagatgtgcctctgggatgtgagtgatggcagatgtattgaatttacaaaattagcttgcacacatactggcatacagttctaccagttctctgttgggaatcagcgagaaggaaggcttttatgccacggacattaccctgaaatccttgttgtggatgctaccagccttgaagtattatactccttagtatcaaagatatcaccagactggattagctccatgagtattattcgatcccaccgaacacaagaggacacagtggtagcactctcggtgactggcatcctgaaggtctggattgttacctcggaaataagtgacatgcaggatactgagccaatatttgaggaggaatccaaaccaatttattgtcagaattgccaaagcatctctttttgtgcatttacacaaaggtcacttttggttgtgtgttccaaatattggagggtgttcgatgccggagactattccttgttgtgttcaggtcctagtgaaaatggacagacatggaccgggggggactttgtctcatcagataaagtcatcatttggacagaaaatgggcaaagttatatttacaaactacctgccagttgccttccagctagtgattcattccgcagtgatgtggggaaggcagttgaaaatttaattcctcctgtacaacatatcctcttggatcgaaaagataaagagttgctaatttgtcctcctgttactcggttcttctatggatgcagagaatatttccataaactgttaattcagggtgattcttctggaaggttgaatatttggaacatatcagacacagctgataaacagggaagtgaagaagggctggcaatgacaacttctattagtttgcaagaggcatttgataaactgaatccttgtcctgctggaattatagatcagctgagtgtgattcccaatagtaatgaacctcttaaagtaactgcaagtgtgtacataccagcacatggacgacttgtttgtggtcgtgaagatggaagcatagttattgtacctgccacacagacggccatagtacagctgttgcaaggggaacacatgctcagaagaggttggccacctcacagaacactccgtggtcatcggaacaaagtcacatgtttgctatatcctcatcaggtctcagctcggtatgatcaaagatacctgatatctggaggtgtggatttttcagtcataatttgggacatattttctggagaaatgaaacatatcttctgtgttcatggtggtgagattactcaacttctagttccacctgaaaactgtagtgcaagagtacagcactgcatctgctctgtagccagtgaccactcagtaggacttctaagtttgcgagagaaaaaatgcataatgttggcatctcgtcacctttttcctattcaagtaatcaaatggaggccttctgatgattacctggtggtggggtgttcagatggttctgtgtacgtctggcaaatggatactggtgcattggatcgttgtgtgatggggataacagcagttgagattctaaacgcttgtgatgaagctgttcctgctgctgttgattcacttagtcatccagcagtcaacctaaaacaagctatgacgagacgtagtcttgctgctcttaaaaatatggcccatcataagctacaaacccttgcaactaacctcttggcttctgaggcatctgacaagggaaatttacctaaatattctcataactccctgatggttcaagcaataaagacaaacctaacagacccggacatacatgtgctattctttgatgtggaagcgttgattattcaactcctgactgaagaagcctctaggccgaatactgctcttatttccccagagaatttgcaaaaagcatctggcagttcagacaaagggggctcttttttaactggaaaacgagcagcagttctcttccaacaagtgaaagaaacgatcaaagagaacatcaaggaacacctccttgatgatgaagaggaggatgaggagataatgaggcagagaagggaagaaagtgatcctgaatatcggtccagcaaatcaaagccattgaccctattagaatataatttaactatggacactgcaaagctgtttatgtcctgccttcacgcctggggtttgaatgaagtactggatgaagtttgcctggatcgccttggaatgctgaaaccccactgcaccgtatcgtttggcctcttgtcaagaggaggccatatgtcactgatgctgccgggttataatcagcctgcttgtaaactgtcacatgggaaaacagaagtaggaaggaagctgccagcgtctgagggagtaggaaagggaacttacggagtgtcccgtgccgtcaccacacagcatctcctgtctatcatttctttggcaaatactttaatgagtatgaccaatgcaacttttattggtgatcatatgaagaagggtcctaccaggccacctagaccaagcaccccagacctttctaaggcaaggggttcccctccaacttccagtaatattgtgcaaggacagattaaacaaggttggagtcagttagctgctatgcactgtgttatgctgccagacctactgggattggataaatttaggcctccccttctggagatgctggcccgaagatggcaagatcgatgcttggaggtgagagaagccgcgcaggccctgcttctggcggaactgagaagaattgagcaggcaggcaggaaggaagccattgatgcctgggctccttacttacctcagtacatagaccacgtcatatcacctggagtcacatcagaagccgcgcagactatcaccacggctcctgatgcctcagggcctgaagcaaaagtccaggaggaagagcatgaccttgttgacgatgacatcaccactggttgcttatcaagtgtcccacaaatgaaaaaaatttctacatcttacgaggaaagacggaagcaagctaccgctattgttttacttggagtaataggagctgaatttggtgctgaaattgaacctcctaaactattgaccagacctcgaagctctagccaaattcctgagggattcgggttgactagtggtggatccaactactcgctggccagacatacttgcaaggcactgacgtttcttctgctacagcctccaagccccaaacttcctccacacagcactatccgaagaacagccattgatctgattggacgtgggttcactgtttgggagccttacatggatgtgtccgctgttctgatggggcttctcgaactttgtgccgatgccgagaaacaacttgccaacatcacaatggggttgcctctgagcccagcagctgactcggcccgctctgcgaggcatgccctctcgctcattgccaccgccagaccacccgccttcatcaccaccatagccaaagaggtacacagacatacggctcttgcagcaaatacccaatcacagcagaatatgcacacaacaactcttgcacgagctaaaggggaaattttgagagtcattgaaattcttattgaaaagatgcccacagatgttgtggatcttctcgtggaggttatggacatcattatgtactgccttgaaggatctttagttaaaaagaaaggtcttcaagaatgtttcccagccatctgcaggttctacatggtcagctattatgagcggaatcacagaatagcagttggagctcgccatggttcagtggccctgtacgacatccggactggaaaatgtcagacaatccatggacacaagggaccaatcactgcagtggcttttgctcctgatggaagatatcttgccacctactcaaacactgacagccacatttctttttggcagatgaacacgtcactgctgggaagcatcggcatgctgaactcggcacctcagctgcgctgcattaaaacctaccaggtgccccctgtgcagcccgcgtcccccggctcccacaatgccctcaagctggcccggctcatctggacttccaaccgcaacgtcatcctcatggcccatgacgggaaggagcaccgcttcatggtctaatgctgctgcctgccgccgtgactgcgttttagttctctaaattatccaagccgatgttgctctgtccttcctcacaccagattgttcccaggggcctgcccaccccagtgccatccagtggcacggccggccgggtcttgtcacttgtgcatgcttctcaggggcagaacccgctcgtgccatctgtcgattcagaggcacgcacacatgctctgcaggatgtggccatcctgtcaccaggtagtttttccctgccagagatggcaggggaaagccagcggttcctgggaacgctcttgttgcttggtgcaacagaagcacaaaaatcaataaacactgtgattgcactcccagcccagatcagcatttttagccatctcaaccgcacctctgaagtgctgcttgaatctggccgttctgacactgggtgttgaggtcatgtggcagtcctcacgattgaaattattgccctttgaattacctaaaatattgtttaccaaaaagattctgtgtttacatgttcttttcttctggtgattgctaggaaattactcaatccaatttcctagggtttagctaccaccttctttatcaacagctaaccaatttgagattcatgattaattatgtacacaaaaatattttccttgtagaaaatagttttccagacacttagccttctgaagtgctcatctcttgcttaaatgatagtctatttagtagtttaaaataaaaataatcactccctatgatctagttaatgtaattatccagtcactgtaactaatctcttgaagggacttttgtgataaagagccaagttcagaagcatagcgtgtaccgaaaatgaagactctcctatctactgctacagatcctgttgaagaaagagcttacccctttcccccggaaaacttgcaatcctgtagttcccatatgtgtggcatatgtcagttatgaaattattataattcagccttcaaactactactgatcaactaaaggaaagctaataaggtatttcttttaaacaagtattctggaaaagtaataactatggcacaaatgttcaggagtgtatataaaaatatgtgggctctcgatttatttgagcaaacattgcaatgagggtgttcattatgcttctaagtaagctttaactagaccactttcttcttatgtcagattgtgctggttctagctcataataatgaaaaaaatagaattatattttgtatgaattgtttctaacaaaccttgatctgtatatacttgtgaggggttgtttggttgcctaattgttgattggttggttagttgggcaaaatcatttattacatgcaaaaatagaaaattatttgttaaattcagagaaaatatgtgaagtttacaaaggaaccaaaatgataatgggagaatttagtcttaaaagtttaggttgtcagagtttatctgatatacaaaaaagtaggatcaaagtctaggaacaaacattggttatttcactgaaacagatttttaaagagcatattaagaaattaagaccattagatcatctctttcataatgatatgatgttatttccattgacggcaaatctatactgttccttggttttagagttgggtattctttcaaaagtgaatttaggcacatgcatgtacattgtatttataaagattatatatgtagtttccaaggaagaaacaaagacctatacagtttagactttatttgtttggtgaacgtgctgttgtgtttggcatagctagagaaatgtaaggtaaaaggctcactttgttttccagtgggtccagagtcttctctatacccaacatatgtttactttatgaacttaaatggaaattaatttattgtagactacatctctatttggaatgatgaggtaaatgtataccttagcattttctttaacaaaaatgttctgtgtgtcaggaaagaggtgtgagagcggtaggcagcctgccgcaaacacacggatggctccccccgccacgaaggttgagaacaaagccagggggcccagaggagcaatagccctgggccacaagcgtgggtaggcctttcacgtattccgtctgcacaggcaaccaaggccagtagaaagctatggctgcaaaaccctggggtggacgatgtttgatgattagacggtcatctctaactactaaactaatatctgcattcttgttaacataaatctctccttggctattttaatagccacagtcccaaacttcatcccagcttagatttctcagcactgaggtaaactctgcattgtcatcccagcgtacacctttaatgttttattgattttactggcactgtatttggacctgtccttgtatatgtagagacatatgtggcttcattggtaatttacaagcaaaagatgacatgacgtgacacctgtatgaaaatgtgatgattgaactccctgtgtacagcgagtgaattaaaatgtctgcctctccagacatttcttaatgattccacttaatagactctatgtgtgctgaatgttcctgtgtacatatgtgtgttaaataaaacaattgtattg

SEQ ID NO: 2521 - protein, 1457 aa, Homo sapiens
MAGNSLVLPIVLWGRKAPTHCISAVLLTDDGATIVTGCHDGQICLWDLSVELQVNPRALLFGHTASITCLSKACASSDKQYIVSASESGEMCLWDVSDGRCIEFTKLACTHTGIQFYQFSVGNQREGRLLCHGHYPEILVVDATSLEVLYSLVSKISPDWISSMSIIRSHRTQEDTVVALSVTGILKVWIVTSEISDMQDTEPIFEEESKPIYCQNCQSISFCAFTQRSLLVVCSKYWRVFDAGDYSLLCSGPSENGQTWTGGDFVSSDKVIIWTENGQSYIYKLPASCLPASDSFRSDVGKAVENLIPPVQHILLDRKDKELLICPPVTRFFYGCREYFHKLLIQGDSSGRLNIWNISDTADKQGSEEGLAMTTSISLQEAFDKLNPCPAGIIDQLSVIPNSNEPLKVTASVYIPAHGRLVCGREDGSIVIVPATQTAIVQLLQGEHMLRRGWPPHRTLRGHRNKVTCLLYPHQVSARYDQRYLISGGVDFSVIIWDIFSGEMKHIFCVHGGEITQLLVPPENCSARVQHCICSVASDHSVGLLSLREKKCIMLASRHLFPIQVIKWRPSDDYLVVGCSDGSVYVWQMDTGALDRCVMGITAVEILNACDEAVPAAVDSLSHPAVNLKQAMTRRSLAALKNMAHHKLQTLATNLLASEASDKGNLPKYSHNSLMVQAIKTNLTDPDIHVLFFDVEALIIQLLTEEASRPNTALISPENLQKASGSSDKGGSFLTGKRAAVLFQQVKETIKENIKEHLLDDEEEDEEIMRQRREESDPEYRSSKSKPLTLLEYNLTMDTAKLFMSCLHAWGLNEVLDEVCLDRLGMLKPHCTVSFGLLSRGGHMSLMLPGYNQPACKLSHGKTEVGRKLPASEGVGKGTYGVSRAVTTQHLLSIISLANTLMSMTNATFIGDHMKKGPTRPPRPSTPDLSKARGSPPTSSNIVQGQIKQGWSQLAAMHCVMLPDLLGLDKFRPPLLEMLARRWQDRCLEVREAAQALLLAELRRIEQAGRKEAIDAWAPYLPQYIDHVISPGVTSEAAQTITTAPDASGPEAKVQEEEHDLVDDDITTGCLSSVPQMKKISTSYEERRKQATAIVLLGVIGAEFGAEIEPPKLLTRPRSSSQIPEGFGLTSGGSNYSLARHTCKALTFLLLQPPSPKLPPHSTIRRTAIDLIGRGFTVWEPYMDVSAVLMGLLELCADAEKQLANITMGLPLSPAADSARSARHALSLIATARPPAFITTIAKEVHRHTALAANTQSQQNMHTTTLARAKGEILRVIEILIEKMPTDVVDLLVEVMDIIMYCLEGSLVKKKGLQECFPAICRFYMVSYYERNHRIAVGARHGSVALYDIRTGKCQTIHGHKGPITAVAFAPDGRYLATYSNTDSHISFWQMNTSLLGSIGMLNSAPQLRCIKTYQVPPVQPASPGSHNALKLARLIWTSNRNVILMAHDGKEHRFMV

SEQ ID NO: 2522 - DNA, 4716 bp, Homo sapiens
gtgggatttggggggcgctggtgggcacccctggatctggcggctgcggcctcgcggggggaggctgatcggtgacaggggcagggggctattttgggggtagaaggcagtgagagcgtgagggggaggggggtccccaacgcccaagccggagccagagacgcggagcccgcgcgagcgtcggagacagggctccagggctccgaagcgacagagccgggccccggccgctgccaggggccccgcccggcccccccactccaccccacgtccctcctgcagcccagctccgcccgcagccgccgcggaccaggcaggcccgcaccgccgccatgatgtgcgaggtgatgcccaccatcagcgaggatggccggcggggctcggcgctgggcccggacgaggcgggcggggagctggagcgcctcatggtcacgatgctcacggagcgcgagcgcctgctggagacgctgcgcgaggcacaggacgggttggctacagcgcagctgcggctgcgcgagctcggccacgagaaggactcgctgcagcgccagctcagcatcgcgctgccccaggagtttgcagctctgacgaaggagctgaacttatgtcgggagcagctgctggagagggaggaagagattgcagagctgaaggcggaacggaacaacacgcggctgctcctggaacacctggagtgcctggtgtccaggcacgagaggtcactgcgcatgaccgtggtgaagcgccaggcccagtccccgggtggggtctcctcggaggtagaagtgctcaaagctctaaagtctctcttcgagcaccacaaggccctggatgagaaggtccgggagcggctgcggatggcgctggagcgcgtggcagtgctcgaggaggagctggaactgagcaatcaggagactctgaaccttcgagaacagctgtctaggcggcggtcagggctggaagagccgggcaaggatggggatgggcagactcttgccaatggcctgggtcctggcggggattccaaccggcgcacagcagagctggaggaggccctggagcggcagcgcgccgaggtgtgccagctgcgggagcgcctggcggtgctgtgccgtcagatgagccagctggaggaggagttgggcaccgcgcaccgtgagctgggcaaggcagaggaagccaactccaagctgcagcgcgacctcaaggaggcgctggcgcagcgggaagatatggaggagcggattacaacactggagaagcgctacctgagcgcccagcgggaggccacgtctctgcacgacgccaacgacaaactggagaacgagttagctagcaaggagtcgttgtatcggcagagtgaagagaagagccgtcagctggccgagtggttggacgacgccaagcagaagctgcagcagacgctgcagaaagcggagaccttgcccgagatagaggcgcagctggcgcagcgcgtggcggcgctcaacaaggccgaggaacgtcatgggaattttgaggagcggcttcggcagctggaggcccagctggaagagaagaatcaagagctgcagcgggcccggcagcgggagaagatgaacgatgaccacaataagcggctgtccgagacggtggacaagctgctgagcgagtccaacgagcgcttacagcttcacctcaaggagcgcatgggggcgctggaggagaagaactccctgagcgaggagatagccaacatgaagaagcttcaggatgagttgctgctaaacaaggagcagctcttggccgaaatggagcggatgcagatggagatcgaccagctgcgggggaggccaccatcctcctactccaggtctctccctggcagtgccctggagctccgttactctcaggcacccactttaccttctggtgcccacctggatccctatgtggctggcagtggtcgggcaggcaagaggggccgctggtcaggggtcaaggaggagccctccaaggattgggagcggtctgcccctgcgggctccataccacccccattccctggggaactggacggctccgatgaggaggaggcagaggggatgtttggggccgagctgctgtcccccagtgggcaggctgacgtgcagacgctggccatcatgcttcaggagcagctggaggccatcaacaaggagatcaagctgatccaagaggagaaggagacaacagaacagagggcagaggagctggagagtcgggtgtccagctctggcttggactcgttgggccgctaccgcagcagctgctccctgcccccctccctcaccacctctacccttgccagcccctcccctcccagctctggccactcaacaccccgcctggcaccccctagccctgcccgtgagggcaccgacaaggctaatcatgtccctaaggaggaagctggagctccacgaggggaggggccggccatcccaggagacaccccaccacccactccccgctctgcccgtcttgagagaatgacccaggccttggcactgcaggcggggtccctggaagatgggggacccccacggggaagtgagggcaccccagattctctgcacaaagcccccaagaagaagagcatcaagtcatccataggccgtctctttggcaagaaagagaagggacgaatgggacccccaggccgggacagctcttctctggctggaacaccctcagatgagacactggccactgaccctctggggctagccaagctgacaggcccaggagacaaggaccgaaggaacaagaggaagcatgaactcctggaggaggcctgccgccagggcctaccttttgctgcctgggacgggcccaccgtggtgtcctggctggagctgtgggtgggcatgcctgcctggtatgtggccgcctgccgggccaatgtcaagagcggtgccatcatggccaacctgtcagacacggagatccagcgcgagatcggcatcagcaacccgctgcaccgactcaagctacgcctcgccatccaggagatggtctcgctcacctcgccctcagcccccgcctcctcccgcacttccacaggaaacgtgtggatgacacacgaggagatggagtcccttacggccacgaccaagcccgagaccaaggagatcagctgggagcagatcctggcatatggcgacatgaaccacgagtgggtggggaacgactggctgcccagcctggggctgccccaataccgcagctacttcatggagtcgctggtggacgctcgaatgttagatcaccttaacaagaaggagctccggggccaactcaagatggtggacagctttcacagggtgagtctacattatgggattatgtgcctgaaacggctcaactatgaccggaaggacctggagcggaggcgggaagaaagtcagacccagatccgagacgtgatggtgtggtccaatgagcgggtcatgggttgggtgtccgggctgggcctgaaggaatttgccacgaacctcacggagagcggggtacacggggcactgctcgccctggacgagaccttcgactactccgacctggccttgctcctgcagatccccacgcagaatgcacaggcccggcagcttctggagaaggaattcagcaaccttatctccttaggcacagacaggcggctggacgaggacagcgccaagtctttcagccgctccccatcctggcggaagatgttccgggagaaggacctccgaggcgtaactcccgactcagctgagatgttgccccccaactttcgttcggctgcagcgggagccctgggctctccggggctccctctccgcaagctgcagccagaaggccagacttctgggagttcccgggcagacggcgtttcggtccggacctattcctgctagtgcaggcctccaggtgacctcactcggacggaagaatcttcccgaggctgggctgttccctctcctgcccggactgtggcctcgccggggagagcgggcgggggagctcgcgccgaggactggaccatctgtacagaccagcgggagtgcgcgcgcccgcctcgcacagggccggggcctggaccaaaccacatgaactggactgagagggggaagaagcggggaggaagaaatcccgccccaaacgtccgctttccttttctctactttgtaatttattgatcagtttctgttgggagacgggtgtcctttacccgcgggaagggggcggggcttccctcccgggccgcatgcggggagaggctgctccctcccctttttcctgcccagtcgcggggcccaagtcttccttcttcgtccgaaaggaggggaggggggactcgctgctacaagcctcgccccctgtgccactcagctccgccccgccgcgtccggtcgccggtcccccgggtcatctgcgggcggggtcccctctccctcccccgtgtctcgtgtccccggggcctcaccgccccccgtgctgtggccgtgtccgtgccccgggggtagggggcgcagaatggcgcttccccttctcctctggctccggggtttgcatgggagaatcctctttccacgatgccgctgggcgacgtggcgtgggggcagggggacggtgggggagccctcgcccccgactctcggtcggcctccccgccccaggcgtcactcagtgatcacgggtaaagagaactgtttc

SEQ ID NO: 2523 - protein, 1267 aa, Homo sapiens
EREGEGGPQRPSRSQRRGARASVGDRAPGLRSDRAGPRPLPGAPPGPPTPPHVPPAAQLRPQPPRTRQARTAAMMCEVMPTISEDGRRGSALGPDEAGGELERLMVTMLTERERLLETLREAQDGLATAQLRLRELGHEKDSLQRQLSIALPQEFAALTKELNLCREQLLEREEEIAELKAERNNTRLLLEHLECLVSRHERSLRMTVVKRQAQSPGGVSSEVEVLKALKSLFEHHKALDEKVRERLRMALERVAVLEEELELSNQETLNLREQLSRRRSGLEEPGKDGDGQTLANGLGPGGDSNRRTAELEEALERQRAEVCQLRERLAVLCRQMSQLEEELGTAHRELGKAEEANSKLQRDLKEALAQREDMEERITTLEKRYLSAQREATSLHDANDKLENELASKESLYRQSEEKSRQLAEWLDDAKQKLQQTLQKAETLPEIEAQLAQRVAALNKAEERHGNFEERLRQLEAQLEEKNQELQRARQREKMNDDHNKRLSETVDKLLSESNERLQLHLKERMGALEEKNSLSEEIANMKKLQDELLLNKEQLLAEMERMQMEIDQLRGRPPSSYSRSLPGSALELRYSQAPTLPSGAHLDPYVAGSGRAGKRGRWSGVKEEPSKDWERSAPAGSIPPPFPGELDGSDEEEAEGMFGAELLSPSGQADVQTLAIMLQEQLEAINKEIKLIQEEKETTEQRAEELESRVSSSGLDSLGRYRSSCSLPPSLTTSTLASPSPPSSGHSTPRLAPPSPAREGTDKANHVPKEEAGAPRGEGPAIPGDTPPPTPRSARLERMTQALALQAGSLEDGGPPRGSEGTPDSLHKAPKKKSIKSSIGRLFGKKEKGRMGPPGRDSSSLAGTPSDETLATDPLGLAKLTGPGDKDRRNKRKHELLEEACRQGLPFAAWDGPTVVSWLELWVGMPAWYVAACRANVKSGAIMANLSDTEIQREIGISNPLHRLKLRLAIQEMVSLTSPSAPASSRTSTGNVWMTHEEMESLTATTKPETKEISWEQILAYGDMNHEWVGNDWLPSLGLPQYRSYFMESLVDARMLDHLNKKELRGQLKMVDSFHRVSLHYGIMCLKRLNYDRKDLERRREESQTQIRDVMVWSNERVMGWVSGLGLKEFATNLTESGVHGALLALDETFDYSDLALLLQIPTQNAQARQLLEKEFSNLISLGTDRRLDEDSAKSFSRSPSWRKMFREKDLRGVTPDSAEMLPPNFRSAAAGALGSPGLPLRKLQPEGQTSGSSRADGVSVRTYSC

SEQ ID NO: 2524 - DNA, 5050 bp, Homo sapiens
cgaaggggggtgggccgggggaggggaggttcgttccgcggagcgcagccagaaccgggaccaagaatcgccttcagccctgtctggtgcatccttggcagaaagtgaggaggaaaacacccccattgttagatgaggtcttaatcatggaacatttgaagtcacgtaaagaaggttctttggcatggacacaagttcagtgggaggattagaattgactgatcagactcctgttttattagggagtacggccatggcaactagtctcacgaatgtaggaaactcatttagtggtccagctaatcctttagtgtctagatctaataagtttcagaactcgtcagtggaagatgatgatgatgttgtttttatcgaacctgtacaacctcccccaccttctgtaccagtggtagctgatcaaagaaccataacatttacatcatcaaaaaatgaagaactacaaggaaatgattccaaaattactccttcctcaaaagagttggcatctcagaagggaagtgtaagtgagacaattgtcattgatgatgaagaggacatggaaacaaatcaagggcaagagaaaaattcctccaattttattgaacgaagacctcctgagactaaaaacagaaccaatgatgtggatttctccacttccagtttttcaagaagtaaggtaaatgcaggaatgggtaatagtggtatcaccacagaaccagactctgaaattcagattgctaatgttacaactttagaaacaggtgtaagctctgtgaatgatggccaattagaaaatactgacgggcgagatatgaacttaatgattacacatgtaacatcactgcagaataccaacttgggagatgtctctaacggactgcagtcaagtaattttggtgttaatatacaaacatacaccccatctttaacttcacagaccaagactggagtaggaccttttaatcctggtagaatgaatgtggcaggagacgtttttcagaatggagaatctgcaactcatcataatcctgattcttggatctcccagtcagcttcatttccccgtaatcagaaacaaccaggggtggactctttatcaccagtggcctcacttcctaaacagattttccagccgtctgtccaacagcagcctactaaaccagttaaagtcacttgtgcaaactgcaaaaaacctttacagaagggccagacagcttatcaacgaaaaggatcagctcacctcttttgttctaccacctgcctttcttccttctcccacaagcctgctccaaagaaactctgtgttatgtgtaaaaaagatataactacaatgaaaggaaccattgttgctcaagtggattcaagtgagtccttccaggaattctgtagtacatcttgtttatctctctatgaagacaaacagaatcctactaaaggagctctaaataaatcaagatgtacaatctgtggtaaactaactgagattcgccatgaagtcagctttaaaaatatgactcataagctgtgcagtgaccactgctttaatagatatagaatggccaatggtttaataatgaattgctgtgaacagtgtggagagtacttgcccagtaaaggtgctggaaataatgttctggtgattgatggtcaacagaaaagattttgctgtcaaagttgtgtcagtgaatacaaacaggtaggtagccatccaagcttcctgaaggaggttcgagatcacatgcaggactctttcttaatgcagcctgagaaatatggaaaactgacaacttgtactggttgccgaacacagtgcaggttttttgatatgactcagtgtataggtcctaatggatatatggagccatattgttcaactgcttgtatgaacagtcacaagacaaaatatgcaaaatcacaaagtttgggaattatttgccatttttgtaagcgaaactctttacctcaataccaagccacaatgcctgatggaaaactgtacaacttttgcaattccagttgtgtggctaaatttcaggctctaagtatgcagtcatctccaaatggccagtttgtagcgccaagtgatattcagttgaaatgcaactactgcaaaaattccttttgttcaaaaccagaaatcctggaatgggagaacaaagtgcatcagttctgcagcaaaacttgttcagatgactataagaagttgcattgcatagttacatattgcgaatactgtcaagaggagaagactcttcatgaaacagtaaatttctctggcgttaagagacctttctgtagtgaaggctgcaaattattatacaaacaggattttgccagacgtttaggattgagatgtgttacttgcaactattgttctcagctatgtaagaagggagcaactaaagaactcgatggtgttgtgagagatttctgcagtgaagattgctgtaaaaaatttcaggattggtactacaaggctgcaaggtgtgactgttgtaaatctcaaggaactcttaaagagcgagttcagtggcgtggggaaatgaaacatttctgtgatcaacattgcttactgcgtttctactgtcaacaaaatgagcccaacatgacaactcagaaaggacctgaaaacttacattatgatcagggttgtcagacatctcgaaccaaaatgacaggttcagcaccacccccttctccaacacctaacaaagagatgaagaacaaagcagttctttgcaaacctttaacaatgacaaaagctacttactgtaaacctcacatgcagaccaaatcttgtcagacagatgatacttggaggacagaatatgttccagtgcctatccctgtgcctgtgtatatcccagttcctatgcacatgtacagtcagaatattcctgttcctactacagttcctgttcctgtgccagttcctgtttttctgcctgctccattggacagcagtgagaagattcctgcagcaattgaggagctaaaaagcaaggtttcttcagatgctcttgatacagagttgcttacaatgacggatatgatgagtgaagacgaggggaaaacagagacaaccaacatcaacagtgtaattattgaaacagatataattggttcagaccttttgaagaactctgacccagagacacagtccagcatgcctgatgtaccatatgaaccagatttggatatcgaaatagattttcccagagctgctgaggagcttgatatggaaaatgaatttttattaccacctgtttttggcgaagaatatgaggaacagcccagacctcgatctaaaaaaaagggagccaagagaaaggctgtatcaggataccagtctcatgatgatagttctgacaattcagaatgcagctttcctttcaaatatacgtatggcgtaaatgcatggaaacactgggtcaaaactaggcaacttgatgaagatcttctggtattagatgagttaaaatcttctaaatcagtaaagttaaaagaggatctactctctcacaccacagctgagcttaactatgggttagctcattttgtcaatgagatccgacggccaaatggagagaattatgcacctgacagcatctattacctttgccttggaatacaggagtatttgtgtggaagtaatcgaaaagacaacatatttattgatcctggataccaaacatttgagcaagaattgaataaaatactgcgaagctggcaaccaagcatacttccagatgggtcaatattctctcgagttgaagaagactatctctggaggataaaacaactaggatcacactctccagtagctcttctgaatacactgttctactttaacactaagtattttggcctgaaaacagtggaacaacacttaagactttcctttggcactgtgtttaggcattggaaaaaaaatcctttaacgatggaaaacaaagcgtgtcttcgataccaagtgtcttccttgtgtggaacagataatgaagataaaattactactggaaaaagaaaacatgaagatgatgagccagtatttgaacaaattgaaaacacagccaatccttccagatgtcctgtgaaaatgtttgaatgctacttgtctaaaagtccacagaatcttaatcagaggatggatgttttttatttgcaaccagaatgctctagttctacagatagccctgtctggtatacgtctacttcactggaccgaaacaccttggaaaatatgcttgtacgggttcttctagtaaaagatatttatgataaagacaattatgaactggatgaagacacagactaaaaaggaacgttgcagaagcaatcgggataaaacagcattagatagtcatgctgctagatctttattatggaaaacatttcaagtttactccttctgttttgagttttgtagcagtgtacccacgctgggtattaccatgtaaataatctgtgagtgaaagttgccattattctatgtagtggttttaggatacttaacaaatacattcaaattctttttttattattatttatttgattaggtatgtttgtaactttttacattacagaatatgaatgagaatgtgccatgtataatttttttcttgtagtaagaaacatccatattgcacaactctactgttgcaaagcttccttggaagggggctcttttactgggttcttaaccagatggttgtgtatgggtagcactactaaaagtttagaacttgcagtgtctttcggaatttttaaaataaactgtaaactaataggctggggtttttgttttgttttggggttttgttttgtttggttttacattttagttactgaagccttacaaggttatgtagagagataccatcttctgtaccaaaaatagacaagagaatgctgtcaatattggtgtactgtaatgtgaatctatgctggtgaaaacaattttttgttccccttattaaaaccttagtgtccttttctcatttgtggctttctgcatcacccaatcaataaaaaacaaatatatatatgt

SEQ ID NO: 2525 - protein, 1377 aa, Homo sapiens
MDTSSVGGLELTDQTPVLLGSTAMATSLTNVGNSFSGPANPLVSRSNKFQNSSVEDDDDVVFIEPVQPPPPSVPVVADQRTITFTSSKNEELQGNDSKITPSSKELASQKGSVSETIVIDDEEDMETNQGQEKNSSNFIERRPPETKNRTNDVDFSTSSFSRSKVNAGMGNSGITTEPDSEIQIANVTTLETGVSSVNDGQLENTDGRDMNLMITHVTSLQNTNLGDVSNGLQSSNFGVNIQTYTPSLTSQTKTGVGPFNPGRMNVAGDVFQNGESATHHNPDSWISQSASFPRNQKQPGVDSLSPVASLPKQIFQPSVQQQPTKPVKVTCANCKKPLQKGQTAYQRKGSAHLFCSTTCLSSFSHKPAPKKLCVMCKKDITTMKGTIVAQVDSSESFQEFCSTSCLSLYEDKQNPTKGALNKSRCTICGKLTEIRHEVSFKNMTHKLCSDHCFNRYRMANGLIMNCCEQCGEYLPSKGAGNNVLVIDGQQKRFCCQSCVSEYKQVGSHPSFLKEVRDHMQDSFLMQPEKYGKLTTCTGCRTQCRFFDMTQCIGPNGYMEPYCSTACMNSHKTKYAKSQSLGIICHFCKRNSLPQYQATMPDGKLYNFCNSSCVAKFQALSMQSSPNGQFVAPSDIQLKCNYCKNSFCSKPEILEWENKVHQFCSKTCSDDYKKLHCIVTYCEYCQEEKTLHETVNFSGVKRPFCSEGCKLLYKQDFARRLGLRCVTCNYCSQLCKKGATKELDGVVRDFCSEDCCKKFQDWYYKAARCDCCKSQGTLKERVQWRGEMKHFCDQHCLLRFYCQQNEPNMTTQKGPENLHYDQGCQTSRTKMTGSAPPPSPTPNKEMKNKAVLCKPLTMTKATYCKPHMQTKSCQTDDTWRTEYVPVPIPVPVYIPVPMHMYSQNIPVPTTVPVPVPVPVFLPAPLDSSEKIPAAIEELKSKVSSDALDTELLTMTDMMSEDEGKTETTNINSVIIETDIIGSDLLKNSDPETQSSMPDVPYEPDLDIEIDFPRAAEELDMENEFLLPPVFGEEYEEQPRPRSKKKGAKRKAVSGYQSHDDSSDNSECSFPFKYTYGVNAWKHWVKTRQLDEDLLVLDELKSSKSVKLKEDLLSHTTAELNYGLAHFVNEIRRPNGENYAPDSIYYLCLGIQEYLCGSNRKDNIFIDPGYQTFEQELNKILRSWQPSILPDGSIFSRVEEDYLWRIKQLGSHSPVALLNTLFYFNTKYFGLKTVEQHLRLSFGTVFRHWKKNPLTMENKACLRYQVSSLCGTDNEDKITTGKRKHEDDEPVFEQIENTANPSRCPVKMFECYLSKSPQNLNQRMDVFYLQPECSSSTDSPVWYTSTSLDRNTLENMLVRVLLVKDIYDKDNYELDEDTD

SEQ ID NO: 2526 - DNA, 1588 bp, Homo sapiens
gcggtgtttgtctgccggactgacgggcggccgggcggtgcgcggcggcggtggcggcggggaaaatggcggcgtcctccctggaacagaagctgtcccgcctggaagcaaagctgaagcaggagaaccgggaggcccggcggaggatcgacctcaacctggatatcagcccccagcggcccaggcccaccctgcagctcccgctggccaacgatgggggcagccgctcgccatcctcagagagctccccgcagcaccccacgccccccgcccggccccgccacatgctggggctcccgtcaaccctgttcacaccccgcagcatggagagcattgagattgaccagaagctgcaggagatcatgaagcagacgggctacctgaccatcgggggccaggtaccaccttcactgtggcggggagagggaggaggcccagccaggctggacccatcctgggagcgccagtggggggcagggggcggtggcagagccccagggaccctccaaccctccctctcctcccagcgctaccaggcagaaatcaacgacctggagaacttgggcgagatgggcagcggcacctgcggccaggtgtggaagatgcgcttccggaagaccggccacgtcattgccgttaagcaaatgcggcgctccgggaacaaggaggagaacaagcgcatcctcatggacctggatgtggtgctgaagagccacgactgcccctacatcgtgcagtgctttgggacgttcatcaccaacacggacgtcttcatcgccatggagctcatgggcacctgcgctgagaagctcaagaagcggatgcagggccccatccccgagcgcattctgggcaagatgacagtggcgattgtgaaggcgctgtactacctgaaggagaagcacggtgtcatccaccgcgacgtcaagccctccaacatcctgctggacgagcggggccagatcaagttctgcgacttcggcatcagcggccgcctggtggactccaaagccaagacgcggagcgccggctgtgccgcctacatggcacccgagcgcattgaccccccagaccccaccaagccggactatgacatccgggccgacgtatggagcctgggcatctcgttggtggagctggcaacaggacagtttccctacaagaactgcaagacggactttgaggtcctcaccaaagtcctacaggaagagcccccgcttctgcccggacacatgggcttctcgggggacttccagtccttcgtcaaagactgccttactaaagatcacaggaagagaccaaagtataataagctacttgaacacagcttcatcaagcgctacgagacgctggaggtggacgtggcgtcctggttcaaggatgtcatggcgaagactgagtcaccgcggactagcggcgtcctgagccagccccacctgcccttcttcaggtagctgcttggcggcggccagccccacagggggccaggggcatggccacaggcccccctccccacttggccacccagctgcctgccaggggagacctgggacctggacggccacctaggactgaggacagagagtgg

SEQ ID NO: 2527 - protein, 462 aa, Homo sapiens
MAASSLEQKLSRLEAKLKQENREARRRIDLNLDISPQRPRPTLQLPLANDGGSRSPSSESSPQHPTPPARPRHMLGLPSTLFTPRSMESIEIDQKLQEIMKQTGYLTIGGQVPPSLWRGEGGGPARLDPSWERQWGAGGGGRAPGTLQPSLSSQRYQAEINDLENLGEMGSGTCGQVWKMRFRKTGHVIAVKQMRRSGNKEENKRILMDLDVVLKSHDCPYIVQCFGTFITNTDVFIAMELMGTCAEKLKKRMQGPIPERILGKMTVAIVKALYYLKEKHGVIHRDVKPSNILLDERGQIKFCDFGISGRLVDSKAKTRSAGCAAYMAPERIDPPDPTKPDYDIRADVWSLGISLVELATGQFPYKNCKTDFEVLTKVLQEEPPLLPGHMGFSGDFQSFVKDCLTKDHRKRPKYNKLLEHSFIKRYETLEVDVASWFKDVMAKTESPRTSGVLSQPHLPFFR

SEQ ID NO: 2528 - DNA, 1459 bp, Homo sapiens
gcggtgtttgtctgccggactgacgggcggccgggcggtgcgcggcggcggtggcggcggggaaaatggcggcgtcctccctggaacagaagctgtcccgcctggaagcaaagctgaagcaggagaaccgggaggcccggcggaggatcgacctcaacctggatatcagcccccagcggcccaggcccaccctgcagctcccgctggccaacgatgggggcagccgctcgccatcctcagagagctccccgcagcaccccacgccccccgcccggccccgccacatgctggggctcccgtcaaccctgttcacaccccgcagcatggagagcattgagattgaccagaagctgcaggagatcatgaagcagacgggctacctgaccatcgggggccagcgctaccaggcagaaatcaacgacctggagaacttgggcgagatgggcagcggcacctgcggccaggtgtggaagatgcgcttccggaagaccggccacgtcattgccgttaagcaaatgcggcgctccgggaacaaggaggagaacaagcgcatcctcatggacctggatgtggtgctgaagagccacgactgcccctacatcgtgcagtgctttgggacgttcatcaccaacacggacgtcttcatcgccatggagctcatgggcacctgcgctgagaagctcaagaagcggatgcagggccccatccccgagcgcattctgggcaagatgacagtggcgattgtgaaggcgctgtactacctgaaggagaagcacggtgtcatccaccgcgacgtcaagccctccaacatcctgctggacgagcggggccagatcaagctctgcgacttcggcatcagcggccgcctggtggactccaaagccaagacgcggagcgccggctgtgccgcctacatggcacccgagcgcattgaccccccagaccccaccaagccggactatgacatccgggccgacgtatggagcctgggcatctcgttggtggagctggcaacaggacagtttccctacaagaactgcaagacggactttgaggtcctcaccaaagtcctacaggaagagcccccgcttctgcccggacacatgggcttctcgggggacttccagtccttcgtcaaagactgccttactaaagatcacaggaagagaccaaagtataataagctacttgaacacagcttcatcaagcgctacgagacgctggaggtggacgtggcgtcctggttcaaggatgtcatggcgaagactgagtcaccgcggactagcggcgtcctgagccagccccacctgcccttcttcaggtagctgcttggcggcggccagccccacagggggccaggggcatggccacaggcccccctccccacttggccacccagctgcctgccaggggagacctgggacctggacggccacctaggactgaggacagagagtgg

SEQ ID NO: 2529 - protein, 419 aa, Homo sapiens
MAASSLEQKLSRLEAKLKQENREARRRIDLNLDISPQRPRPTLQLPLANDGGSRSPSSESSPQHPTPPARPRHMLGLPSTLFTPRSMESIEIDQKLQEIMKQTGYLTIGGQRYQAEINDLENLGEMGSGTCGQVWKMRFRKTGHVIAVKQMRRSGNKEENKRILMDLDVVLKSHDCPYIVQCFGTFITNTDVFIAMELMGTCAEKLKKRMQGPIPERILGKMTVAIVKALYYLKEKHGVIHRDVKPSNILLDERGQIKLCDFGISGRLVDSKAKTRSAGCAAYMAPERIDPPDPTKPDYDIRADVWSLGISLVELATGQFPYKNCKTDFEVLTKVLQEEPPLLPGHMGFSGDFQSFVKDCLTKDHRKRPKYNKLLEHSFIKRYETLEVDVASWFKDVMAKTESPRTSGVLSQPHLPFFR

SEQ ID NO: 2530 - DNA, 1557 bp, Homo sapiens
gcggtgtttgtctgccggactgacgggcggccgggcggtgcgcggcggcggtggcggcggggaagatggcggcgtcctccctggaacagaagctgtcccgcctggaagcaaagctgaagcaggagaaccgggaggcccggcggaggatcgacctcaacctggatatcagcccccagcggcccaggcccaggactgtctggcgcccccctcccccggcctgggggcttgtcagccccgtgcagcgacgatctacgcacacgcgcacgcctggctcggggacacctgagttattgtgatcactctaagccctgctcctgccccgtcccaacgagcaggtaccagcctttttatcatcgctgcttggacatctgcaccattgacctaaccgctgccccggccgcagaatggcgtcccccagcccccatgctctgtgtgtgtccccatgtcccttcccctcactctcactttctctctcactccactcaagcagcggtcagcccagcccagcctcctctgcgtcctccctcctcctccccctcccttactcccagctccactttggactccctggaggaggaggtgggctcccccactgaatgggagtctgtggcctccgggggtggggggggtgcacgcctgtgtgtgtgtaactgagagaacgagaaagttgggcctggtgggtgggtggcctgtgcctatggatctctctcaacaactaggtgaacacatagcaccccccgggttccataccagccctgggcgccagggacacagcagtgaatagaacagatggagcccctctcctctgtagcggggggctgcaataggggggcccactggacaaggagcacattcccaccagagagaacattctagctgggtgagcggccctgcagggggccagcctgggggaacctctggagacggtgggaattgaacaaagcctctggggaggccaggcacggtggctcacacctgtgatcccaacactcggggaggttgaggctacagggagccatgatcacaccactgcaccccagcctgggtgacagcgagatcctgtctcaaaaatttaaaaactggtccaggcgcagtggctcatgcctgtaatttcagtactttgggaggccaaggagggtggatcacttgaggtcaggagttcgagaccagcctggccaacatggtgaaaccctgtctgcattaaaaatactagagattaggccaggcacagtgactcacacctgtaattccagcactttgggagaccgaggcgggtggctcacctgaggtcgggagttcgagaccaccctgaccaacatagagaaaccccgtctccactaaaaatacaaaattagccgggcatggtggcacatacctgtaatcccagctactcgggaggctgtaatcctagctactcgggaggctgaggcaggagaaccgcttgaacccgggaggcggagattgcagtgagctgagatcgcaccattgcacttcagcctgggcaacaagagcaaaactccatctcagaaaaaaaaaaaaaaaaaaaaaaaaaaaaaa

SEQ ID NO: 2531 - protein, 76 aa, Homo sapiens
MAASSLEQKLSRLEAKLKQENREARRRIDLNLDISPQRPRPRTVWRPPPPAWGLVSPVQRRSTHTRTPGSGTPELL

SEQ ID NO: 2532 - DNA, 4625 bp, Homo sapiens
ccggaggatgtgcagctgcggcggcggcgccggctacgaagaggacggggacaggcgccgtgcgaaccgagcccagccagccggaggacgcgggcagggcgggacgggagcccggactcgtctgccgccgccgtcgtcgccgtcgtgccggccccgcgtccccgcgcgcgagcgggaggagccgccgccacctcgcgcccgagccgccgctagcgcgcgccgggcatggtcccctcttaaaggcgcaggccgcggcggcgggggcgggcgtgcggaacaaagcgccggcgcggggcctgcgggcggctcgggggccgcgatgggcgcggcgggcccgcggcggcggcggcgctgcccgggccgggcctcgcggcgctagggcgggctggcctccgcgggcgggggcagcgggctgagggcgcgcggagcctgcggcggcggcggcggcggcggcggcggcccggcgggcggagcggcgcgggcatggccgcgcgcggccggcgcgcctggctcagcgtgctgctcgggctcgtcctgggcttcgtgctggcctcgcggctcgtcctgccccgggcttccgagctgaagcgagcgggcccacggcgccgcgccagccccgagggctgccggtccgggcaggcggcggcttcccaggccggcggggcgcgcggcgatgcgcgcggggcgcagctctggccgcccggctcggacccagatggcggcccgcgcgacaggaactttctcttcgtgggagtcatgaccgcccagaaatacctgcagactcgggccgtggccgcctacagaacatggtccaagacaattcctgggaaagttcagttcttctcaagtgagggttctgacacatctgtaccaattccagtagtgccactacggggtgtggacgactcctacccgccccagaagaagtccttcatgatgctcaagtacatgcacgaccactacttggacaagtatgaatggtttatgagagcagatgatgacgtgtacatcaaaggagaccgtctggagaacttcctgaggagtttgaacagcagcgagcccctctttcttgggcagacaggcctgggcaccacggaagaaatgggaaaactggccctggagcctggtgagaacttctgcatgggggggcctggcgtgatcatgagccgggaggtgcttcggagaatggtgccgcacattggcaagtgtctccgggagatgtacaccacccatgaggacgtggaggtgggaaggtgtgtccggaggtttgcaggggtgcagtgtgtctggtcttatgagatgcagcagcttttttatgagaattacgagcagaacaaaaaggggtacattagagatctccataacagtaaaattcaccaagctatcacattacaccccaacaaaaacccaccctaccagtacaggctccacagctacatgctgagccgcaagatatccgagctccgccatcgcacaatacagctgcaccgcgaaattgtcctgatgagcaaatacagcaacacagaaattcataaagaggacctccagctgggaatccctccctccttcatgaggtttcagccccgccagcgagaggagattctggaatgggagtttctgactggaaaatacttgtattcggcagttgacggccagccccctcgaagaggaatggactccgcccagagggaagccttggacgacattgtcatgcaggtcatggagatgatcaatgccaacgccaagaccagagggcgcatcattgacttcaaagagatccagtacggctaccgccgggtgaaccccatgtatggggctgagtacatcctggacctgctgcttctgtacaaaaagcacaaagggaagaaaatgacggtccctgtgaggaggcacgcgtatttacagcagactttcagcaaaatccagtttgtggagcatgaggagctggatgcacaagagttggccaagagaatcaatcaggaatctggatccttgtcctttctctcaaactccctgaagaagctcgtcccctttcagctccctgggtcgaagagtgagcacaaagaacccaaagataaaaagataaacatactgattcctttgtctgggcgtttcgacatgtttgtgagatttatgggaaactttgagaagacgtgtcttatccccaatcagaacgtcaagctcgtggttctgcttttcaattctgactccaaccctgacaaggccaaacaagttgaactgatgagagattaccgcattaagtaccctaaagccgacatgcagattttgcctgtgtctggagagttttcaagagccctggccctggaagtaggatcctcccagtttaacaatgaatctttgctcttcttctgcgacgtcgacctcgtgtttactacagaattccttcagcgatgtcgagcaaatacagttctgggccaacaaatatattttccaatcatcttcagccagtatgacccaaagattgtttatagtgggaaagttcccagtgacaaccattttgcctttactcagaaaactggcttctggagaaactatgggtttggcatcacgtgtatttataagggagatcttgtccgagtgggtggctttgatgtttccatccaaggctgggggctggaggatgtggaccttttcaacaaggttgtccaggcaggtttgaagacgtttaggagccaggaagtaggagtagtccacgtccaccatcctgtcttttgtgatcccaatcttgaccccaaacagtacaaaatgtgcttggggtccaaagcatcgacctatgggtccacacagcagctggctgagatgtggctggaaaaaaatgatccaagttacagtaaaagcagcaataataatggctcagtgaggacagcctaatgtccagctttgctggaaaagacgtttttaattatctaatttatttttcaaaaattttttgtatgatcagtttttgaagtccgtatacaaggatatattttacaagtggttttcttacataggactcctttaagattgagctttctgaacaagaaggtgatcagtgtttgcctttgaacacatcttcttgctgaacattatgtagcagacctgcttaactttgacttgaaatgtacctgatgaacaaaacttttttaaaaaaatgttttcttttgagaccctttgctccagtcctatggcagaaaacgtgaacattcctgcaaagtattattgtaacaaaacactgtaactctggtaaatgttctgttgtgattgttaacattccacagattctaccttttgtgttttgttttttttttttttttacaattgttttaaagccatttcatgttccagttgtaagataaggaaatgtgataatagctgtttcatcattgtcttcaggagagctttccagagttgatcatttcccctcatggtactctgctcagcatggccacgtaggttttttgtttgttttgttttgttctttttttgagacggagtctcactctgttacccaggctggaatgcagtggcgcaatcttggctcactttaacctccacttccctggttcaagcaattcccctgcctttgcctcccgagtagctgggattacaggcacacaccaccacgcccagctagtttttttgtatttttagtagagacggggtttcaccatgcaagcccagctggccacgtaggttttaaagcaaggggcgtgaagaaggcacagtgaggtatgtggctgttctcgtggtagttcattcggcctaaatagacctggcattaaatttcaagaaggatttggcattttctcttcttgacccttctctttaaagggtaaaatattaatgtttagaatgacaaagatgaattattacaataaatctgatgtacacagactgaaacacacacacatacaccctaatcaaaacgttggggaaaaatgtatttggttttgttcctttcatcctgtctgtgttatgtgggtggagatggttttcattctttcattactgttttgttttatcctttgtatctgaaatacctttaatttatttaatatctgttgttcagagctctgccatttcttgagtacctgttagttagtattatttatgtgtatcgggagtgtgtttagtctgttttatttgcagtaaaccgatctccaaagatttccttttggaaacgctttttcccctccttaatttttatattccttactgttttactaaatattaagtgttctttgacaattttggtgctcatgtgttttggggacaaaagtgaaatgaatctgtcattataccagaaagttaaattctcagatcaaatgtgccttaataaatttgttttcatttagatttcaaacagtgatagacttgccattttaatacacgtcattggagggctgcgtatttgtaaatagcctgatgctcatttggaaaaataaaccagtgaacaatatttttctattgtacttttcagaaccattttgtctcattattcctgttttagctgaagaattgtattacatttggagagtaaaaaacttaaacacgaaaaaaaaaaaaaaaaaaaaaaaaaaaaaaaaaaaaaaaaaaaaaaaaaaaaaaaaaaaaaaaaaaaa

SEQ ID NO: 2533 - protein, 802 aa, Homo sapiens
MAARGRRAWLSVLLGLVLGFVLASRLVLPRASELKRAGPRRRASPEGCRSGQAAASQAGGARGDARGAQLWPPGSDPDGGPRDRNFLFVGVMTAQKYLQTRAVAAYRTWSKTIPGKVQFFSSEGSDTSVPIPVVPLRGVDDSYPPQKKSFMMLKYMHDHYLDKYEWFMRADDDVYIKGDRLENFLRSLNSSEPLFLGQTGLGTTEEMGKLALEPGENFCMGGPGVIMSREVLRRMVPHIGKCLREMYTTHEDVEVGRCVRRFAGVQCVWSYEMQQLFYENYEQNKKGYIRDLHNSKIHQAITLHPNKNPPYQYRLHSYMLSRKISELRHRTIQLHREIVLMSKYSNTEIHKEDLQLGIPPSFMRFQPRQREEILEWEFLTGKYLYSAVDGQPPRRGMDSAQREALDDIVMQVMEMINANAKTRGRIIDFKEIQYGYRRVNPMYGAEYILDLLLLYKKHKGKKMTVPVRRHAYLQQTFSKIQFVEHEELDAQELAKRINQESGSLSFLSNSLKKLVPFQLPGSKSEHKEPKDKKINILIPLSGRFDMFVRFMGNFEKTCLIPNQNVKLVVLLFNSDSNPDKAKQVELMRDYRIKYPKADMQILPVSGEFSRALALEVGSSQFNNESLLFFCDVDLVFTTEFLQRCRANTVLGQQIYFPIIFSQYDPKIVYSGKVPSDNHFAFTQKTGFWRNYGFGITCIYKGDLVRVGGFDVSIQGWGLEDVDLFNKVVQAGLKTFRSQEVGVVHVHHPVFCDPNLDPKQYKMCLGSKASTYGSTQQLAEMWLEKNDPSYSKSSNNNGSVRTA

SEQ ID NO: 2534 - DNA, 6246 bp, Homo sapiens
cgcccggtggcagctgtggggtctagggctcagacgggggccattttgccagaggctgcctcccggagttgggggcggcctggcggcaggctgaagctgttcttttgcctcttctgcagcttggggcttggagaggatctggaagtctgggctccatcgagccctttggagacggcaatggtttcttccaaccaccaccacctgacaaccctgcatggcggctgccccctccgcgctgcttctgctgccgccctttccagtcctctctacctatcggctccagagccgcagtcgtccttccgccccagagaccgatgatagtcgagttgggggcattatgagaggagagaaaaactactacttccgtggagctgcgggggaccacggttcctgccccactacaacttcgcctctggcctcggccctcttgatgccctcggaggcagtctcaagcagctggtctgagtctggaggcggtttgtcagggggagatgaagaggacactcggctccttcaactcctccgcactgcccgggatccttctgaggccttccaggctttgcaagctgctttgccgcggcggggcggtcgacttggcttcccccgacgcaaggaagctttgtatcgggcactgggccgagtgcttgtggaaggaggtagtgatgagaagcggctctgcttgcaacttctctcggacgttctccggggtcagggggaggcaggccagcttgaagaggcctttagcttagcacttttgcctcaactagttgtctcgttacgggaagagaatccagccctgcggaaagatgcgctgcagatccttcatatatgtctgaaacgtagtcctggagaggtgctgagaacgcttatacaacaaggactggaaagtaccgatgcccgacttagagcttccacagcactactgcttcccatcttgcttactactgaggacttgttgcttggtctggatctcaccgaggtgataatatccctagcccgaaagcttggtgatcaggagacagaagaagaatctgagacagctttctccgcacttcaacaaattggggagcgacttggccaagacaggtttcaatcttacatttctcgtctgccctctgccctgaggagacactacaatcgccgcctggagtcccagtttggaagtcaggttccttattatttggaacttgaagcctctggatttcctgaagatccccttccctgtgcagtgactctttccaacagcaatcttaaatttgggattattcctcaggagctgcattcacgattattggatcaggaagactataagaaccggacccaggccgtcgaagaactaaagcaggtgctgggaaaatttaaccctagttctactcctcattctagtcttgttggcttcattagtttgctatataatttgttagacgattctaacttcaaagtggtgcatggcacacttgaagtcctgcatttactggttattcgccttggagagcaggtacagcagttcttgggaccagttatagcagcttctgtcaaagtgctggcggacaacaagttggtgatcaaacaagaatacatgaaaatcttcctcaagctaatgaaggaagtaggacctcagcaggtgctttgtttactcctgaaacatctcaaacataagcattccagagtgagagaggaggtggtgaacatttgcatctgctccctgctgacctatcctagtgaggattttgacttgcccaaactgtcctttgatcttgccccagctcttgtagatagcaaacgcagggtacgccaagcagctttagaagcttttgccgtattggcatcatcaatgggctcaggtaaaaccagcatcctttttaaagctgtggatacagttgaactgcaagataatggagatggagtgatgaatgctgtgcaggccagattggctaggaaaaccttaccaaggctcacagagcagggatttgtggaatatgcagtactgatgccatcttctgccgggggtaggtcaaaccatttggcacatggagcagatacggactggcttttggctggtaacagaactcagagtgcacactgtcactgtggtgaccacgtgagggatagcatgcacatttatggatcttacagcccaactatctgtacccgaagggtattaagtgcaggaaaaggaaaaaataaattaccatgggaaaatgagcaacctggaatcatgggagaaaaccagacctccacttccaaggatatagagcagttttcaacatatgatttcatcccatctgcaaaattaaagctttctcaaggaatgccagtcaatgatgatttatgttttagcagaaaaagagtatcaagaaacttatttcagaatagtcgggattttaacccagattgtcttcctttatgtgctgctggtactactgggactcatcaaacaaatctttctgggaaatgtgcacaacttggattttcacaaatatgtggtaaaactggcagtgtgggttctgacttacaattcctagggacaactagcagtcatcaagaaaaagtgtatgctagcctcaattttggcagtaagacacagcaaacatttggtagtcaaacagagtgtacttcctcaaatggtcaaaatccaagtccaggagcttacatccttccatcctatcctgtctcatcacctcgaactagtccaaagcatacatctcctcttattatatctccaaagaagtctcaagataattctgttaatttctcaaattcctggcctcttaaaagcttcgaaggactatcaaagccaagtccacagaagaagcttgtcagccaaaaatcgtctgatcctacgggtagaaatcatggagaaaattctcaagaaaaacctccagttcagcttacacctgccttggtgagatcgccatcttcccgacgaggtctaaatgggacaaagcctgttcctcccataccaaggggaataagccttttgcctgataaagctgatttaagcacagtgggacacaaaaagaaagagcctgatgatatttggaagtgtgaaaaagatagtcttccaattgatctttcagaattaaatttcaaggataaagatttggatcaagaagagatgcatagctctcttaggtcccttcgtaatagtgcagctaagaaaagagcaaaactgagtggcagtactttagatcttgaaagccctgattctgcaatgaagctcgacttgacgatggactccccgtctctgtcttcctcaccaaacatcaattcttacagtgaaagtggagtttacagccaagaatcattgacttcttctctgtctacaactccccaggggaagagaataatgtcagacatatttccaacatttgggtcaaaaccttgtccaacaagactttcttctgcaaagaaaaaaatttctcatattgctgaacaaagccccagtgcagggtcatcatcaaatccacagcaaatttccagttttgacttcacaaccacaaaggctttatcagaagactcagtagtagttgttggaaaaggcgtatttggaagtttaagttcagcaccagcaacctgcagccaatcagtgatatcttctgtggaaaatggggatacattttcaattaaacaaagtattgaaccaccatcagggatttatggaagatcagtccagcaaaatatttcatcatatcttgatgttgagaatgaaaaagatgctaaagtttctatttctaaatctacttataacaagatgagacaaaagagaaaagaagagaaagaactgtttcacaataaagattgtgaaaagaaggaaaaaaattcctgggaacgaatgagacatacaggaactgagaaaatggcatctgaaagtgaaacacctactggagctatttcacagtataaagaaaggatgccttctgtcactcatagtccagaaataatggatctgtcagaactacgaccattctctaaaccagaaatagcactgacagaagccctgaggcttttggctgatgaggattgggagaagaaaattgagggactgaattttattagatgcttagctgcttttcattctgagatactgaacacaaagttgcatgaaacaaattttgcagttgttcaagaggtgaaaaatttacgttctggagtttctcgtgctgctgtggtctgtttaagtgatcttttcacttatttgaaaaagagcatggatcaagagctagataccacagtaaaagttttgttgcacaaggctggtgaatcaaatacatttataagagaagatgttgacaaagcattgagagctatggttaataatgtaactcctgcacgtgcagttgtttctcttatcaatggtggacaaaggtattatggtcgaaagatgctgttcttcatgatgtgtcatcctaactttgaaaaaatgcttgaaaagtatgtcccatctaaagatttgccatatattaaggactctgttagaaacttacagcaaaagggtttgggggagataccattagatactccttcagcaaaaggaagacgatctcatactggcagtgttggaaatacaagatcatcatctgtttctagagatgctttcaattcagctgaaagagctgtaactgaagttcgtgaagtcaccagaaaatcagtccctcgtaattccttagaaagtgctgagtaccttaaactcataactggcttattaaatgcaaaagactttcgtgatcgtattaatgggattaagcagcttttatcagatacagaaaataatcaagaccttgttgttggaaacattgtgaagatttttgatgcttttaaatctcgacttcatgattctaatagtaaagtaaatctggtggctctggaaacaatgcacaaaatgattcctctacttagagaccacttatctcctataatcaacatgctaattccagcaatagtggataacaatctgaattccaagaatccaggcatctatgcggctgctacaaatgttgttcaggcactgagtcagcatgtagacaattacttacttctacagccattttgcacaaaagctcagtttttaaatggaaaagcaaaacaggacatgacggaaaagcttgctgatattgttacggaactttatcaaaggaagccgcatgccacagagcagaaagtgttggttgttttatggcatctcttaggaaatatgacaaatagtggctctctgcctggagctggaggaaatatacgaacagccacagctaaattatcaaaagcactctttgcacagatgggtcagaatctgttaaatcaggctgcatctcaaccaccacatatcaaaaagagtttggaggaattactcgatatgacaattttaaatgaattatgaatcttcgataaaatactgtatgatgaacaaaagtgtttacatgatgacaaatggaactttctaaaagttatgttatcagtgcctgcacttcacatccagcaaattaagtcaatggctatttttatttgcagcctatgagtacacatctgtcctatatcaaccttaccacttatattcatcacataaaaacctaaaatattcatgaataattcatgaaatctgagtcacatgggatgaattcaattttaatatttttgagaaaagtcctgctcatttgcactattctatagaaactacaatttgttgccctatatgtaaaattagaattgtaattaaaaatacacattttattatgtaatcatgttctggtatgtctcatttctcagccttattttataacgtggaagtcattgaactatgttatcagaaactaagtttgtatattatttgtgaaaaacatgtatttctgaatcagtccgctaatatgattgtgcagtattagcttgcttttgctgctgtgttaatgtcatatatttgcttaccttttgggttcaattatctacataattgtgaaatttaacaagttataataaagcatgacaaccaaagttttagaaaacattaaacattttaaatgcacgtttaaaaaacgtgttgaatgtaacccccctatttttgtgtgcaaacactaaattttattgctttatgttttgacctttataaaggtgttattctgctgcccagttttgtaattctcaaaaatagtgccaggtcttctatagcttttttcagaattcatgggcttacaagtactgtatgcatctttaaaaagaaaaggaatgttataaaataaaaggatttatttcttt

SEQ ID NO: 2535 - protein, 1723 aa, Homo sapiens
QPCMAAAPSALLLLPPFPVLSTYRLQSRSRPSAPETDDSRVGGIMRGEKNYYFRGAAGDHGSCPTTTSPLASALLMPSEAVSSSWSESGGGLSGGDEEDTRLLQLLRTARDPSEAFQALQAALPRRGGRLGFPRRKEALYRALGRVLVEGGSDEKRLCLQLLSDVLRGQGEAGQLEEAFSLALLPQLVVSLREENPALRKDALQILHICLKRSPGEVLRTLIQQGLESTDARLRASTALLLPILLTTEDLLLGLDLTEVIISLARKLGDQETEEESETAFSALQQIGERLGQDRFQSYISRLPSALRRHYNRRLESQFGSQVPYYLELEASGFPEDPLPCAVTLSNSNLKFGIIPQELHSRLLDQEDYKNRTQAVEELKQVLGKFNPSSTPHSSLVGFISLLYNLLDDSNFKVVHGTLEVLHLLVIRLGEQVQQFLGPVIAASVKVLADNKLVIKQEYMKIFLKLMKEVGPQQVLCLLLKHLKHKHSRVREEVVNICICSLLTYPSEDFDLPKLSFDLAPALVDSKRRVRQAALEAFAVLASSMGSGKTSILFKAVDTVELQDNGDGVMNAVQARLARKTLPRLTEQGFVEYAVLMPSSAGGRSNHLAHGADTDWLLAGNRTQSAHCHCGDHVRDSMHIYGSYSPTICTRRVLSAGKGKNKLPWENEQPGIMGENQTSTSKDIEQFSTYDFIPSAKLKLSQGMPVNDDLCFSRKRVSRNLFQNSRDFNPDCLPLCAAGTTGTHQTNLSGKCAQLGFSQICGKTGSVGSDLQFLGTTSSHQEKVYASLNFGSKTQQTFGSQTECTSSNGQNPSPGAYILPSYPVSSPRTSPKHTSPLIISPKKSQDNSVNFSNSWPLKSFEGLSKPSPQKKLVSQKSSDPTGRNHGENSQEKPPVQLTPALVRSPSSRRGLNGTKPVPPIPRGISLLPDKADLSTVGHKKKEPDDIWKCEKDSLPIDLSELNFKDKDLDQEEMHSSLRSLRNSAAKKRAKLSGSTLDLESPDSAMKLDLTMDSPSLSSSPNINSYSESGVYSQESLTSSLSTTPQGKRIMSDIFPTFGSKPCPTRLSSAKKKISHIAEQSPSAGSSSNPQQISSFDFTTTKALSEDSVVVVGKGVFGSLSSAPATCSQSVISSVENGDTFSIKQSIEPPSGIYGRSVQQNISSYLDVENEKDAKVSISKSTYNKMRQKRKEEKELFHNKDCEKKEKNSWERMRHTGTEKMASESETPTGAISQYKERMPSVTHSPEIMDLSELRPFSKPEIALTEALRLLADEDWEKKIEGLNFIRCLAAFHSEILNTKLHETNFAVVQEVKNLRSGVSRAAVVCLSDLFTYLKKSMDQELDTTVKVLLHKAGESNTFIREDVDKALRAMVNNVTPARAVVSLINGGQRYYGRKMLFFMMCHPNFEKMLEKYVPSKDLPYIKDSVRNLQQKGLGEIPLDTPSAKGRRSHTGSVGNTRSSSVSRDAFNSAERAVTEVREVTRKSVPRNSLESAEYLKLITGLLNAKDFRDRINGIKQLLSDTENNQDLVVGNIVKIFDAFKSRLHDSNSKVNLVALETMHKMIPLLRDHLSPIINMLIPAIVDNNLNSKNPGIYAAATNVVQALSQHVDNYLLLQPFCTKAQFLNGKAKQDMTEKLADIVTELYQRKPHATEQKVLVVLWHLLGNMTNSGSLPGAGGNIRTATAKLSKALFAQMGQNLLNQAASQPPHIKKSLEELLDMTILNEL

SEQ ID NO: 2536 - DNA, 2905 bp, Homo sapiens
ggccgaatacatcaagcaatggtaacatctttaaatgaagataatgaaagtgtaactgttgaatggatagaaaatggagatacaaaaggcaaagagattgacctggagagcatcttttcacttaaccctgaccttgttcctgatgaagaaattgaacccagtccagaaacacctccacctccagcatcctcagccaaagtaaacaaaattgtaaagaatcgacggactgtagcttctattaagaatgaccctccttcaagagataatagagtggttggttcagcacgtgcacggcccagtcaatttcctgaacagtcttcctctgcacaacagaatggtagtgtttcagatatatctccagttcaagctgcaaaaaaggaatttggacccccttcacgtagaaaatctaattgtgtgaaagaagtagaaaaactgcaagaaaaacgagagaaaaggagattgcaacagcaagaacttagagaaaaaagagcccaggacgttgatgctacaaacccaaattatgaaattatgtgtatgatcagagactttagaggaagtttggattatagaccattaacaacagcagatcctattgatgaacataggatatgtgtgtgtgtaagaaaacgaccactcaataaaaaagaaactcaaatgaaagatcttgatgtaatcacaattcctagtaaagatgttgtgatggtacatgaaccaaaacaaaaagtagatttaacaaggtacctagaaaaccaaacatttcgttttgattatgcctttgatgactcagctcctaatgaaatggtttacaggtttactgctaaaccactagtggaaactatatttgaaaggggaatggctacatgctttgcttatgggcagactggaagtggaaaaactcatactatgggtggtgacttttcaggaaagaaccaagattgttctaaaggaatttatgcattagcagctcgagatgtctttttaatgctaaagaagccaaactataagaagctagaacttcaagtatatgcaaccttctttgaaatttatagtggaaaggtgtttgacttgctaaacaggaaaacaaaattaagagttctagaagatggaaaacagcaggttcaagtggtgggattacaggaacgggaggtcaaatgtgttgaagatgtactgaaactcattgacataggcaacagttgcagaacatccggtcaaacatctgcaaatgcacattcatctcggagccatgcagtgtttcagattattcttagaaggaaaggaaaactacatggcaaattttctctcattgatttggctggaaatgaaagaggagctgatacttccagtgcggacaggcaaactaggcttgaaggtgctgaaattaataaaagccttttagcactcaaggagtgcatcagagccttaggtagaaataaacctcatactcctttccgtgcaagtaaactcactcaggtgttaagagattctttcataggtgaaaactctcgtacctgcatgattgccacaatctctccaggaatggcatcctgtgaaaatactcttaatacattaagatatgcaaatagggtcaaagaattgactgtagatccaactgctgctggtgatgttcgtccaataatgcaccatccaccaaaccagattgatgacttagagacacagtggggtgtggggagttcccctcagagagatgatctaaaacttctttgtgaacaaaatgaagaagaagtctctccacagttgtttactttccacgaagctgtttcacaaatggtagaaatggaagaacaagttgtagaagatcacagggcagtgttccaggaatctattcggtggttagaagatgaaaaggccctcttagagatgactgaagaagtagattatgatgtcgattcatatgctacacaacttgaagctattcttgagcaaaaaatagacattttaactgaactgcgggataaagtgaaatctttccgtgcagctctacaagaggaggaacaagccagcaagcaaatcaacccgaagagaccccgtgccctttaaaccggcatttgctgctaaaggatacccagaaccctcactactgtaacatacaacggttcagctgtaagggccatttgaaagtttggaattttaagtgtctgtggaaaatgttttgtccttcacctgaattacatttcaattttgtgaaacactcttttgtctacaaaatgcttctagtccaggaggcacaaccaagaactgggattaatgaagcattttgtttcatttacacaaatagtgatttacttttggagatccttgtcagttttattttctatttgatgaagtaagactgtggactcaatccagagccagatagtaggggaagccacagcatttccttttaactcagttcaatttttgtagtgagactgagcagttttaaatcctttgcgtgcatgcatacctcatcagtgattgtacataccttgcccactcctagagacagctgtgctcacttttcctgctttgtgccttgattaaggctactgaccctaaatttctgaagcacagccaagaaaaattacattccttgtcattgtaaattacctttgtgtgtacatttttactgtatttgagacattttttgtgtgtgactagttaattttgcaggatgtgccatatcattgaacggaactaaagtctgtgacagtggatatagctgctggaccattccatcttatatgtaaagaaatctggaattattattttaaaaccatataacatgtgattataatttttcttagcattttctttgtaaagaactacaatataaactagttggtgtataataaaaagtaatgaaattctgaagaaaaaaaaaaaaaaaaaaaaaaaaaaaaaaaaa

SEQ ID NO: 2537 - protein, 679 aa, Homo sapiens
MVTSLNEDNESVTVEWIENGDTKGKEIDLESIFSLNPDLVPDEEIEPSPETPPPPASSAKVNKIVKNRRTVASIKNDPPSRDNRVVGSARARPSQFPEQSSSAQQNGSVSDISPVQAAKKEFGPPSRRKSNCVKEVEKLQEKREKRRLQQQELREKRAQDVDATNPNYEIMCMIRDFRGSLDYRPLTTADPIDEHRICVCVRKRPLNKKETQMKDLDVITIPSKDVVMVHEPKQKVDLTRYLENQTFRFDYAFDDSAPNEMVYRFTAKPLVETIFERGMATCFAYGQTGSGKTHTMGGDFSGKNQDCSKGIYALAARDVFLMLKKPNYKKLELQVYATFFEIYSGKVFDLLNRKTKLRVLEDGKQQVQVVGLQEREVKCVEDVLKLIDIGNSCRTSGQTSANAHSSRSHAVFQIILRRKGKLHGKFSLIDLAGNERGADTSSADRQTRLEGAEINKSLLALKECIRALGRNKPHTPFRASKLTQVLRDSFIGENSRTCMIATISPGMASCENTLNTLRYANRVKELTVDPTAAGDVRPIMHHPPNQIDDLETQWGVGSSPQRDDLKLLCEQNEEEVSPQLFTFHEAVSQMVEMEEQVVEDHRAVFQESIRWLEDEKALLEMTEEVDYDVDSYATQLEAILEQKIDILTELRDKVKSFRAALQEEEQASKQINPKRPRAL

SEQ ID NO: 2538 - DNA, 2952 bp, Homo sapiens
ggcgcggtcgagtcatcgcagggcctcaccgcttcgttctcccgtccctccccgcgccttggctcgactagccaagtgaggcgggaggcgactcggacctttccctgcatttcgtttcggccagtgccggggctacccgccctggggcctgggatccttggggcccgtgagccactcttagcggccggggctaccgcggcccgccgtggccctcatgaggcatagctgaccaagctgctggcagcctcgggcagcaactccccaacccgcagtgagagcccggagccggctgcaacttgttcgctgccctctgacctgacccgggctgcagcgggggaggaggagacggcggcggcgatctcccggccgcaagcagcagtttggcgacgaaggagagttggaagccgggagggggagccgcggcggcgtggccgtgcgcgcgccctcccccgaggagatggaggaggaggcgatcgccagcctcccgggggaagagacggaggatatggactttctgtctgggctggaactggcggatctcctggaccccaggcaaccggactggcacctggaccccgggcttagctcgccggggcctctctcctcgtctggcggaggctcggatagcggcggcctgtggagaggggacgatgacgatgaggccgcggctgctgaaatgcagcgcttctctgacctgctgcaaaggctgttaaacggtatcggaggctgcagcagcagcagtgacagtggcagcgccgaaaagaggcggagaaagtccccaggaggaggcggcggtggcggcagcggtaacgacaacaaccaggcggcgacaaagagtccccggaaggcggcggcggccgctgcccgccttaatcgactgaagaagaaggagtacgtgatggggctggagagtcgagtccggggtctggcagccgagaaccaggagctgcgggccgagaatcgggagctgggcaaacgcgtacaggcactgcaggaggagagtcgctacctacgggcagtcttagccaacgagactggactggctcgcttgctgagccggctgagcggcgtgggactgcggctgaccacctcgctcttcagagactcgcccgccggtgaccacgactacgctctgccagtgggaaagcagaagcaggacctgctggaagaggacgactcggcgggaggagtctgtctccatgtggacaaggataaggtgtcggtggagttctgctcggcgtgcgcccggaaggcgtcgtcttctcttaaaatgtagggtcaagtaatctgctctttatccgcgtttacccctttcaactcccttacaccatgtcaaacttaccttagtgggacatcttcaccggacacatttcagaggagagaaaaaaagtaatattgaatcttaaagtgtttagctaaaagcatgaatgtgacacagtaaccaactcctaatgataacatgtgactattaaatctctctgacagtttcttttttaggtgatttccttcctgccaggctccgttgtaggggttacagaacagtcgttcccgcctcacaacctgtggatacagctgttggggcagaagagacgggaccagctgctggccacatttcctgctttattttaaaaggtagtataagaatgaggaaaaagaggtaatatcagggcttctgctgttttttatttttaacatgttcataattaaaaagtattttccagcagtccaaagatgtaagttatcttacacataatatgttttattttgttatttggttatgaaaatggaatccttgttcttgcacaactgtaaatgttttgttgctagataatacgatttgagacctgaattggtctttggtttccagtgcatcacagcatattttgtaaaatcatgtactactgcacttgagcatgaatgggtagtagccaaactcacaaattggagtgatgaacctgcttatacctaagggcaggagcaagcccctcacaatgcagctgcatgggtttttagtgcctactgaattatatatatatatacatatatatatatatatataaaccaaaagtagttggaaagattatttgaaatgactaactttgtgctatctttatgaaatatgttaaatgtagcttttttgaaacagaagccttgaattgaaatttaactaatacttgaacattttgtatatatttctttgtatataattttgtgcagtaccaatgacaaaaatatggtgtcataataaaaccaggtttgttgatcttttagttatgggctcaaagaatttattcatctctaacatgatattggaaaataatggatgaaaataggaaaaatgattgttaatgctgactgtgggtcttaaaaggttctggaaagcagtaagttcatttttctaaaaactataacattctgttggagtattttcttccttacgtcaatacttttcctgcattatttgaaattgtgggctggggagaaacagtagtcaaagctttctgaattgagatactttgaaattccaagtgtagatttttagaatgtcattttataaatggccgtttttggaattacttgataagaacttttgaaaatggaaggattagtatggcctatttttaaagctgctttgttaggttccttatgttttattaactgtcttttctcagtttccatttcatttttttttttctagttttggtgacttagtgattttgtcattttttacatcaacttcatggtcttgtttttacatggtaattgcatgtacttaggatctatctaataggggctttaaataaatttggtcatatttatgtgtaagcacattttactgtaaatgtttgggtttctgaatttaaacagatctgtttatttcagtatgtagtaaacaatatcttaaagtgtccgattcactacttgttaattaaaaaagttatgattaatgtg

SEQ ID NO: 2539 - protein, 272 aa, Homo sapiens
MEEEAIASLPGEETEDMDFLSGLELADLLDPRQPDWHLDPGLSSPGPLSSSGGGSDSGGLWRGDDDDEAAAAEMQRFSDLLQRLLNGIGGCSSSSDSGSAEKRRRKSPGGGGGGGSGNDNNQAATKSPRKAAAAAARLNRLKKKEYVMGLESRVRGLAAENQELRAENRELGKRVQALQEESRYLRAVLANETGLARLLSRLSGVGLRLTTSLFRDSPAGDHDYALPVGKQKQDLLEEDDSAGGVCLHVDKDKVSVEFCSACARKASSSLKM

SEQ ID NO: 2540 - DNA, 2145 bp, Homo sapiens
atcttttttcatcttctagctgtagctcgggctgcttgtcggcttggctccccctcccccctttgctctctgcctcgtctttccccaggacttcgctattttgcttttttaaaaaaaggcaagaaagaactaaactcccccctccctctcctccagtcgggctgcacctctgccttgcactttgcacagaggtagagagcgcgcgagggagagagaggaaagaaaaaaaataataaagagagccaagcagaagaggaggcgagaagcatgaagtgttaactcccccgtgccaaggcccgcgccgcccggacagacgcccgccgcgccttccagccccgagcggacgccgcgcgccgccctgcctgcagcccgggccggcgacggcgagcccttccttatgcaaagcgcgccagcagcgcgaaggcgggacgccgcgcaccgggccgggctcctccagcttcgccgccgcagccaccaccgccgccaccgcagctcgcggaggatcttcccgagcctgaagccgccggctcggcgcgcaaggaggcgagcgcaaggaggggccggggcgagcgagggagcacattggcgtgagcaggggggagggagggcgggcgcggggggcgcgggcagggcgggggggtgtgtgtgtgagcgcgcttggaggtttcgggccagccaccgccgcgcaagctagaagcgccccagcccggcaagctggctcacccgctggccacccagcacagcccgctggcccctctcctgcagcccatctggcggagcggcggcggcggcggcggcggcaggagaatggcatcagaactggcaatgagcaactccgacctgcccaccagtcccctggccatggaatatgttaatgacttcgatctgatgaagtttgaagtgaaaaaggaaccggtggagaccgaccgcatcatcagccagtgcggccgtctcatcgccgggggctcgctgtcctccacccccatgagcacgccgtgcagctcggtgcccccttcccccagcttctcggcgcccagcccgggctcgggcagcgagcagaaggcgcacctggaagactactactggatgaccggctacccgcagcagctgaaccccgaggcgctgggcttcagccccgaggacgcggtcgaggcgctcatcagcaacagccaccagctccagggcggcttcgatggctacgcgcgcggggcgcagcagctggccgcggcggccggggccggtgccggcgcctccttgggcggcagcggcgaggagatgggccccgcggccgccgtggtgtccgccgtgatcgccgcggccgccgcgcagagcggcgcgggcccgcactaccaccaccaccaccaccacgccgccggccaccaccaccacccgacggccggcgcgcccggcgccgcgggcagcgcggccgcctcggccggtggcgctgggggcgcgggcggcggtggcccggccagcgctgggggcggcggcggcggcggcggcggcggaggcggcgggggcgcggcgggggcggggggcgccctgcacccgcaccacgccgccggcggcctgcacttcgacgaccgcttctccgacgagcagctggtgaccatgtctgtgcgcgagctgaaccggcagctgcgcggggtcagcaaggaggaggtgatccggctgaagcagaagaggcggaccctgaaaaaccgcggctatgcccagtcctgccgcttcaagagggtgcagcagagacacgtcctggagtcggagaagaaccagctgctgcagcaagtcgaccacctcaagcaggagatctccaggctggtgcgcgagagggacgcgtacaaggagaaatacgagaagttggtgagcagcggcttccgagaaaacggctcgagcagcgacaacccgtcctctcccgagtttttcataactgagcccactcgcaagttggagccatcagtgggatacgccacattttggaagccccagcatcgtgtacttaccagtgtgttcacaaaatgaaatttgtgtgagagctgtacattaaaaaaaacatcattattattattatttgcagtcatggagaaccacctacccctgacttctgtttagtctcctttttaaataatactgtgttagaaaaaaaaa

SEQ ID NO: 2541 - protein, 403 aa, Homo sapiens
MASELAMSNSDLPTSPLAMEYVNDFDLMKFEVKKEPVETDRIISQCGRLIAGGSLSSTPMSTPCSSVPPSPSFSAPSPGSGSEQKAHLEDYYWMTGYPQQLNPEALGFSPEDAVEALISNSHQLQGGFDGYARGAQQLAAAAGAGAGASLGGSGEEMGPAAAVVSAVIAAAAAQSGAGPHYHHHHHHAAGHHHHPTAGAPGAAGSAAASAGGAGGAGGGGPASAGGGGGGGGGGGGGGAAGAGGALHPHHAAGGLHFDDRFSDEQLVTMSVRELNRQLRGVSKEEVIRLKQKRRTLKNRGYAQSCRFKRVQQRHVLESEKNQLLQQVDHLKQEISRLVRERDAYKEKYEKLVSSGFRENGSSSDNPSSPEFFITEPTRKLEPSVGYATFWKPQHRVLTSVFTK

SEQ ID NO: 2542 - DNA, 2060 bp, Homo sapiens
gcggccgcgtggggcccagcacaaagacctgtccccaggggccgccgcctccgccgctgctgctgccgccagcctagagccgcccgccgaagcagagccggcgccggggtcctcatccccaccggtcccgaggggcggctgctgcccgtcgccacgaggcccaggggcccgagtgccgagccctttgctccctcggccgcgcggggacagggctgctgagcagcctccgcctctcccggctgtgggggccccactgagtatgtcggaggagagcgacatggacaaagccatcaaggaaacttccattttagaagaatacagtatcaattggactcagaagctgggagctggaattagtggtccagttagagtctgtgtaaagaaatctactcaagaacggtttgcgctgaaaattcttcttgatcgtccaaaagctagaaatgaggtacgtctgcacatgatgtgtgccacacacccaaacatagttcagattattgaagtgtttgctaacagtgtccagtttccccatgagtccagccctagggcccgactcttaattgtaatggagatgatggaagggggagagctatttcacagaatcagccagcaccggcactttacagagaagcaagccagccaagtaacaaagcagatagctttggctctgcggcactgtcacttgttaaacattgcgcacagagacctcaagcctgaaaatctgctttttaaggataactctttggatgccccagtgaagttgtgtgactttggatttgccaagattgaccaaggtgacttgatgacaccccagttcaccccttattatgtagcaccccaggtactggaggcgcaaagaaggcatcagaaggagaaatctggcatcatacctacctcaccgacgccctacacttacaacaagagctgtgacttgtggtccctaggggtgattatctatgtgatgctgtgcggataccctcctttttactccaaacaccacagccggactatcccaaaggatatgcgaagaaagatcatgacaggcagttttgagttcccagaggaagagtggagtcagatctcagagatggccaaagatgttgtgaggaagctcctgaaggtcaaaccggaggagagactcaccatcgagggagtgctggaccacccctggctcaattccaccgaggccctggataatgtgctgccttctgctcagctgatgatggacaaggcagtggttgcaggaatccagcaggctcacgcggaacagttggccaacatgagaatccaggatctgaaagtcagcctcaaacccctgcactcagtgaacaaccccattctgcggaagaggaagttacttggcaccaagccaaaggacagtgtctatatccacgaccatgagaatggagccgaggattccaatgttgccttggaaaaactccgagatgtgattgctcagtgtattctcccccaggctggagagaatgaagatgagaaactgaatgaagtaatgcaggaggcttggaagtataaccgggaatgcaaactcctaagagatactctgcagagcttcagctggaatggtcgtggattcacagataaagtagatcgactaaaactggcagaaattgtgaagcaggtgatagaagagcaaaccacgtcccacgaatcccaataatgacagcttcagactttgtttttttaacaatttgaaaaattattctttaatgtataaagtaattttatgtaaattaataaatcataatttcatttccacattgattaaagctgctgtatagatttagggtgcaggacttaataatagtatagttattgtttgtttttaagaaaagctcagttctagagacatactattactttaggactgtgtagttgtatatttgtaagatgacagatgatgctgtcaagcaatattgttttatttgtaataaaatatacaaaaatcacttgccagcagtagaaaaaggaccgactataccgacctttctgattagtaaacagttgaatcaaggactctggaaaaaaaaaaaaaaaaaaaaaaa

SEQ ID NO: 2543 - protein, 471 aa, Homo sapiens
MSEESDMDKAIKETSILEEYSINWTQKLGAGISGPVRVCVKKSTQERFALKILLDRPKARNEVRLHMMCATHPNIVQIIEVFANSVQFPHESSPRARLLIVMEMMEGGELFHRISQHRHFTEKQASQVTKQIALALRHCHLLNIAHRDLKPENLLFKDNSLDAPVKLCDFGFAKIDQGDLMTPQFTPYYVAPQVLEAQRRHQKEKSGIIPTSPTPYTYNKSCDLWSLGVIIYVMLCGYPPFYSKHHSRTIPKDMRRKIMTGSFEFPEEEWSQISEMAKDVVRKLLKVKPEERLTIEGVLDHPWLNSTEALDNVLPSAQLMMDKAVVAGIQQAHAEQLANMRIQDLKVSLKPLHSVNNPILRKRKLLGTKPKDSVYIHDHENGAEDSNVALEKLRDVIAQCILPQAGENEDEKLNEVMQEAWKYNRECKLLRDTLQSFSWNGRGFTDKVDRLKLAEIVKQVIEEQTTSHESQ

SEQ ID NO: 2544 - DNA, 2066 bp, Homo sapiens
gcggccgcgtggggcccagcacaaagacctgtccccaggggccgccgcctccgccgctgctgctgccgccagcctagagccgcccgccgaagcagagccggcgccggggtcctcatccccaccggtcccgaggggcggctgctgcccgtcgccacgaggcccaggggcccgagtgccgagccctttgctccctcggccgcgcggggacagggctgctgagcagcctccgcctctcccggctgtgggggccccactgagtatgtcggaggagagcgacatggacaaagccatcaaggaaacttccattttagaagaatacagtatcaattggactcagaagctgggagctggaattagtggtccagttagagtctgtgtaaagaaatctactcaagaacggtttgcgctgaaaattcttcttgatcgtccaaaagctagaaatgaggtacgtctgcacatgatgtgtgccacacacccaaacatagttcagattattgaagtgtttgctaacagtgtccagtttccccatgagtccagccctagggcccgactcttaattgtaatggagatgatggaagggggagagctatttcacagaatcagccagcaccggcactttacagagaagcaagccagccaagtaacaaagcagatagctttggctctgcggcactgtcacttgttaaacattgcgcacagagacctcaagcctgaaaatctgctttttaaggataactctttggatgccccagtgaagttgtgtgactttggatttgccaagattgaccaaggtgacttgatgacaccccagttcaccccttattatgtagcaccccaggtactggaggcgcaaagaaggcatcagaaggagaaatctggcatcatacctacctcaccgacgccctacacttacaacaagagctgtgacttgtggtccctaggggtgattatctatgtgatgctgtgcggataccctcctttttactccaaacaccacagccggactatcccaaaggatatgcgaagaaagatcatgacaggcagttttgagttcccagaggaagagtggagtcagatctcagagatggccaaagatgttgtgaggaagctcctgaaggtcaaaccggaggagagactcaccatcgagggagtgctggaccacccctggctcaattccaccgaggccctggataatgtgctgccttctgctcagctgatgatggacaaggcagtggttgcaggaatccagcaggctcacgcggaacagttggccaacatgagaatccaggatctgaaagtcagcctcaaacccctgcactcagtgaacaaccccattctgcggaagaggaagttacttggcaccaagccaaaggacagtgtctatatccacgaccatgagaatggagccgaggattccaatgttgccttggaaaaactccgagatgtgattgctcagtgtattctcccccaggctggtaaaggagagaatgaagatgagaaactgaatgaagtaatgcaggaggcttggaagtataaccgggaatgcaaactcctaagagatactctgcagagcttcagctggaatggtcgtggattcacagataaagtagatcgactaaaactggcagaaattgtgaagcaggtgatagaagagcaaaccacgtcccacgaatcccaataatgacagcttcagactttgtttttttaacaatttgaaaaattattctttaatgtataaagtaattttatgtaaattaataaatcataatttcatttccacattgattaaagctgctgtatagatttagggtgcaggacttaataatagtatagttattgtttgtttttaagaaaagctcagttctagagacatactattactttaggactgtgtagttgtatatttgtaagatgacagatgatgctgtcaagcaatattgttttatttgtaataaaatatacaaaaatcacttgccagcagtagaaaaaggaccgactataccgacctttctgattagtaaacagttgaatcaaggactctggaaaaaaaaaaaaaaaaaaaaaaa

SEQ ID NO: 2545 - protein, 473 aa, Homo sapiens
MSEESDMDKAIKETSILEEYSINWTQKLGAGISGPVRVCVKKSTQERFALKILLDRPKARNEVRLHMMCATHPNIVQIIEVFANSVQFPHESSPRARLLIVMEMMEGGELFHRISQHRHFTEKQASQVTKQIALALRHCHLLNIAHRDLKPENLLFKDNSLDAPVKLCDFGFAKIDQGDLMTPQFTPYYVAPQVLEAQRRHQKEKSGIIPTSPTPYTYNKSCDLWSLGVIIYVMLCGYPPFYSKHHSRTIPKDMRRKIMTGSFEFPEEEWSQISEMAKDVVRKLLKVKPEERLTIEGVLDHPWLNSTEALDNVLPSAQLMMDKAVVAGIQQAHAEQLANMRIQDLKVSLKPLHSVNNPILRKRKLLGTKPKDSVYIHDHENGAEDSNVALEKLRDVIAQCILPQAGKGENEDEKLNEVMQEAWKYNRECKLLRDTLQSFSWNGRGFTDKVDRLKLAEIVKQVIEEQTTSHESQ

SEQ ID NO: 2546 - DNA, 2040 bp, Homo sapiens
ccatggctcagcctctgggtccagagcctcagctcctacctcttccctccttgccagcccctgatgcctgccagacttttgcctctgctggagcccctgcctgaccagcttcccctccctgtctggttgggatttgggggctgagctgtctggggtcccagggccaaccaatgcagtgccggctcccgcggggcctggctggagccctcctcaccctcctgtgcatggggctcctgtgtctgcggtaccacttgaacctgtccccgcagcgggtacaagggacccccgagctgagccagccgaacccggggccccctaagctacagctacacgatgtcttcattgcagtgaagacgacccgggctttccaccgcttgcgcctggagctgctgcttgacacgtgggtttccaggaccagggaacagacatttgtcttcaccgacagcccagacaaaggcctccaggagagactggggtcccaccttgtggtcaccaactgctccgcggaacacagccacccagctctgtcctgcaagatggctgctgagttcgacaccttcttggccagtgggcttaggtggttctgccatgtggacgatgacaactatgtgaacccaagggcgctgctgcagcttctgagagccttcccgctggcccgcgacgtctatgtgggaaggcccagcctgaaccggcccatccatgcctcagagccacagccccacaaccgcacgaggctggtacagttctggtttgccactgggggtgctggcttctgcatcaatcgcaaactggctttgaagatggctccgtgggccagtggctcccgtttcatggacacatctgctctcatccggctgcctgatgactgcaccatgggctatatcattgagtgcaagctgggcggccgcctgcagcccagccccctctttcactcccacctggagaccctgcagctgctgaggactgcacagctcccagaacaggtcaccctcagctacggtgtctttgaggggaaactcaacgtcattaagctacagggccccttctccccggaggaggacccctccagatttcgctccctccattgtctgctctatccagatacaccctggtgtccccagctgggtgcccgatgaatcctgaactgctgggcaaaggttgggcagagacttctgggtgtgccttggctcccaaggtggcactgtgggtccctggcaagtgtcttgtgataggcagtccctggcagggccttcgggtggttggcaagcccaggatctgagtggcaattggcactgaaggcaccccaggcccctgggaggtgagttagacagcccaggggaccaggtggaccaggtggtggccagagaggctccaggggctagactccctcaggaggctgaattgaaaaagggcagggggcacttgagctgggctggggctcaggggtcctaaccctttaggcagtgacatggcctctgggtggggtctggccgttggccctggctaatgtctctcagtcattcccctggggctcaagcgctgggccgcccactcctgcctccctcatctgtgtcccgagttcctgaagggacatgggtggaatgatggcagaatccagggtctgcagcacctgctgttgttgccaaccagtctcccaaagctccttgctccccaccccttgcgaacaggaccagattttgtttggagcctcagcatgccggggcccagatgatggagcataacgggtcccagccaattgtgatgatcctttttgctcatttcccagcctttcttgctgttaggggctaccatgggaccagctctggccagagggaactaagcaaatccaatagagatgtttctggggaaggttttgcagcccactccccatcttcctgctataaatgtgggtgtgatggctggatctggggcagccaccttgctaccatgaaggaaaggccaagacaatcatccacagctattccctccagcatctggttctgtacaaaaattaaatgcttatttgtttaagtcaaaaaa

SEQ ID NO: 2547 - protein, 321 aa, Homo sapiens
MQCRLPRGLAGALLTLLCMGLLCLRYHLNLSPQRVQGTPELSQPNPGPPKLQLHDVFIAVKTTRAFHRLRLELLLDTWVSRTREQTFVFTDSPDKGLQERLGSHLVVTNCSAEHSHPALSCKMAAEFDTFLASGLRWFCHVDDDNYVNPRALLQLLRAFPLARDVYVGRPSLNRPIHASEPQPHNRTRLVQFWFATGGAGFCINRKLALKMAPWASGSRFMDTSALIRLPDDCTMGYIIECKLGGRLQPSPLFHSHLETLQLLRTAQLPEQVTLSYGVFEGKLNVIKLQGPFSPEEDPSRFRSLHCLLYPDTPWCPQLGAR

SEQ ID NO: 2548 - DNA, 1232 bp, Homo sapiens
tttcccgagatcaccaagatgctgggcgccgagtggagcaagctgcagccaacggaaaagcagcggtacctggatgaggccgagagagagaagcagcagtacatgaaggagctgcgggcgtaccagcagtctgaagcctataagatgtgcacggagaagatccaggagaagaagatcaagaaagaagactcgagctctgggctcatgaacactctcctgaatggacacaagggtggggactgcgatggcttctccaccttcgatgttcccatcttcactgaagagttcttggaccaaaacaaagcgcgtgaggcggagcttcggcgcttgcggaagatgaatgtggccttcgaggagcagaacgcggtactgcagaggcaaaacgcagagcatgagcagcgcgcgcgagcgtctggagcaggagctggcgctggaggagcggaggacgctggcgctgcagcagcagctccaggccgtgcgccaggcgctcaccgccagcttcgcctcactgccggtgccgggcacgggcgaaacgcccacgctgggcactctggacttctacatggcccggcttcacggagccatcgagcgcgaccccgcccagcacgagaagctcatcgtccgcatcaaggaaatcctggcccaggtcgccagcgagcacctgtgaggagtgggcgggcccacgatgcagaggagaagctgtgggcgcggccctgccacaccccaccccgtggacgagaggctgggggtccaccctttggggcctggtcccatcctgcacctttgggggctccagcccccctaaaattaaatttctgcagcatccctttagctttcaatctccccagccccctgaacccggaaaaagcactcgctgcgcgatacacccagaagaacctcacagccgagggtgcccctcctcggaggacagccacgcgctacactggctctccgggccacccccaggacacagggcagacgaaacccacccccagcacacggcaggaccccccaaattactcactacggggggctgtgccataggccacacaggaagctgccttgtggggacttacctggggtgtcccccgcatgcctgtaccccagatgggtgggggccggctttgcccatcctgctctcctccagccgagggaccctggtgggggtggctccttctcactgctggatccggactttttaaataaaaacaagtaaaatttgtgttttaaaa

SEQ ID NO: 2549 - protein, 341 aa, Homo sapiens
MLGAEWSKLQPTEKQRYLDEAEREKQQYMKELRAYQQSEAYKMCTEKIQEKKIKKEDSSSGLMNTLLNGHKGGDCDGFSTFDVPIFTEEFLDQNKAREAELRRLRKMNVAFEEQNAVLQRQNAEHEQRARASGAGAGAGGAEDAGAAAAAPGRAPGAHRQLRLTAGAGHGRNAHAGHSGLLHGPASRSHRARPRPAREAHRPHQGNPGPGRQRAPVRSGRAHDAEEKLWARPCHTPPRGREAGGPPFGAWSHPAPLGAPAPLKLNFCSIPLAFNLPSPLNPEKALAARYTQKNLTAEGAPPRRTATRYTGSPGHPQDTGQTKPTPSTRQDPPNYSLRGAVP

SEQ ID NO: 2550 - DNA, 600 bp, Homo sapiens
  misc_feature (450)..(450): n is a, c, g, or t
  misc_feature (464)..(464): n is a, c, g, or t
  misc_feature (499)..(499): n is a, c, g, or t
  misc_feature (585)..(585): n is a, c, g, or t
tttttttttttttttttttttttttttttgcaacacaagtcaatctttattgaaaactgcagtattaatacataacaattcttgttacaataaacgtgcttttgagatttttaaatctgagctcatctcatcagattgcataaaaaattaaaatagtatcaattgacacctaactgaactggctcaggatggaaattccattccttggcatggatacgtaagttcaatgcagaggtgagggatgcctttaacactggaagacaatgctgacttagcttaaaaaaagtaccgagagaacggtgtaaaaaacggtatttaaaaatcatttttaaaaaaacaaaaaggaaccgtttcttctttagttacaatccatgaggctctctagggcctctccgtgtggccagcacagcaaccctggctaggagcacaaacggctggccgagatctggnccagctggccttgnccactgggctgcacagggactcatggggcacagcnggtgggtgaggaggagacacctgtcatgccagtcctgggagcacacccacccttctgcaggtccggggggggggtcccaaaaagangccggtaacctcgtt

SEQ ID NO: 2551 - DNA, 4339 bp, Homo sapiens
cccttaataagatttgccacgtacactcgagccatcgcgagtgtccttgagccgcgggtgacggtggctctcgctgctcgcgccccctcctcccgcggggggagcctgatgccacgttccctatgaattatttatcgccggcctaaaaataccccgaacttcacagcccgagtgaccctccggtggacatgggtggggccctggggccggccctgttgctcacctcgctcttcggtgcctgggcagggctgggtccggggcagggcgagcagggcatgacggtggccgtggtgtttagcagctcagggccgccccaggcccagttccgtgcccgcctcaccccccagagcttcctggacctacccctggagatccagccgctcacagttggggtcaacaccaccaaccccagcagcctcctcacccagatctgcggcctcctgggtgctgcccacgtccacggcattgtctttgaggacaacgtggacaccgaggcggtggcccagatccttgacttcatctcctcccagacccatgtgcccatcctcagcatcagcggaggctctgctgtggtcctcacccccaaggagccgggctccgccttcctgcagctgggcgtgtccctggagcagcagctgcaggtgctgttcaaggtgctggaagagtacgactggagcgccttcgccgtcatcaccagcctgcacccgggccacgcgctcttcctggagggcgtgcgcgccgtcgccgacgccagccacgtgagttggcggctgctggacgtggtcacgctggagctgggcccgggagggccgcgcgcgcgcacgcagcgcctgctgcgccagctcgacgcgcccgtgtttgtggcctactgctcgcgcgaggaggccgaggtgctcttcgccgaggcggcgcaggccggtctggtggggcccggccacgtgtggctggtgcccaacctggcgctgggcagcaccgatgcgccccccgccaccttccccgtgggcctcatcagcgtcgtcaccgagagctggcgcctcagcctgcgccagaaggtgcgcgacggcgtggccattctggccctgggcgcccacagctactggcgccagcatggaaccctgccagccccggccggggactgccgtgttcaccctgggcccgtcagccctgcccgggaggccttctacaggcacctactgaatgtcacctgggagggccgagacttctccttcagccctggtgggtacctggtccagcccaccatggtggtgatcgccctcaaccggcaccgcctctgggagatggtggggcgctgggagcatggcgtcctatacatgaagtaccccgtgtggcctcgctacagtgcctctctgcagcctgtggtggacagtcggcacctgacggtggccacgctggaagagcggccctttgtcatcgtggagagccctgaccctggcacaggaggctgtgtccccaacaccgtgccctgccgcaggcagagcaaccacaccttcagcagcggggacgtggccccctacaccaagctctgctgtaagggattctgcatcgacatcctcaagaagctggccagagtggtcaaattctcctacgacctgtacctggtgaccaacggcaagcatggcaagcgggtgcgcggcgtatggaacggcatgattggggaggtgtactacaagcgggcagacatggccatcggctccctcaccatcaatgaggaacgctccgagatcgtagacttctctgtaccctttgtggagacgggcatcagtgtgatggtggctcgcagcaatggcaccgtctccccctcggccttcttggagccatatagccctgcagtgtgggtgatgatgtttgtcatgtgcctcactgtggtggccatcaccgtcttcatgttcgagtacttcagccctgtcagctacaaccagaacctcaccagaggcaagaagtccgggggcccagctttcactatcggcaagtccgtgtggctgctgtgggcgctggtcttcaacaactcagtgcccatcgagaacccgcggggcaccaccagcaagatcatggttctggtctgggccttctttgctgtcatcttcctcgccagctacacggccaacctggccgccttcatgatccaagagcaatacatcgacactgtgtcgggcctcagtgacaagaagtttcagcggcctcaagatcagtacccacctttccgcttcggcacggtgcccaacggcagcacggagcggaacatccgcagtaactaccgtgacatgcacacccacatggtcaagttcaaccagcgctcggtggaggacgcgctcaccagcctcaagatggggaagctggatgccttcatctatgatgctgctgtcctcaactacatggcaggcaaggacgagggctgcaagctggtcaccattgggtctggcaaggtctttgctaccactggctacggcatcgccatgcagaaggactcccactggaagcgggccatagacctggcgctcttgcagttcctgggggacggagagacacagaaactggagacagtgtggctctcagggatctgccagaatgagaagaacgaggtgatgagcagcaagctggacatcgacaacatggcaggcgtcttctacatgctgctggtggccatggggctggccctgctggtcttcgcctgggagcacctggtctactggaagctgcgccactcggtgcccaactcatcccagctggacttcctgctggctttcagcaggggcatctacagctgcttcagcggggtgcagagcctcgccagcccaccgcggcaggccagcccggacctcacggccagctcggcccaggccagcgtgctcaagatgctgcaggcagcccgcgacatggtgaccacggcgggcgtaagcagctccctggaccgcgccactcgcaccatcgagaattggggtggcggccgccgtgcgcccccaccgtccccctgcccgaccccgcggtctggccccagcccatgcctgcccacccccgacccgcccccagagccgagccccacgggctggggaccgccagacgggggtcgcgcggcgcttgtgcgcagggctccgcagcccccgggccgccccccgacgccggggccgcccctgtccgacgtctcccgagtgtcgcgccgcccagcctgggaggcgcggtggccggtgcggaccgggcactgcgggaggcacctctcggcctccgagcggcccctgtcgcccgcgcgctgtcactacagctcctttcctcgagccgaccgatccggccgccccttcctcccgctcttcccggagcccccggagctggaggacctgccgctgctcggtccggagcagctggcccggcgggaggccctgctgcacgcggcctgggcccggggctcgcgcccgcgtcacgcttccctgcccagctccgtggccgaggccttcgctcggcccagctcgctgcccgctgggtgcaccggccccgcctgcgcccgccccgacggccactcggcctgcaggcgcttggcgcaggcgcagtcgatgtgcttgccgatctaccgggaggcctgccaggagggcgagcaggcaggggcccccgcctggcagcacagacagcacgtctgcctgcacgcccacgcccacctgccattttgctggggggctgtctgtcctcaccttccaccctgtgccagccacggctcctggctctccggggcctgggggcctctggggcacaggggcaggactctggggctgggcacaggctacagagacagtgggggactggacgagatcagcagtgtagcccgtgggacgcaaggcttcccgggaccctgcacctggagacggatctccagtctggagtcagaagtgtgagttatcagccactcaggctccgagccagctggattctctgcctgccactgtcagggttaagcggcaggcaggattgggcttttctggcttctaccatgaaatcctggccatgggaccccagtgacagatgatgtcttccatggtcatcagtgacctcagtagcctcaaatcatggtgagggctgggcttttgctgtcctcttctcacgcagagttctgccaggagggtgtgctgtgggggtcagactcctgaggctctcccttccctggggctagccagttactggtcatgcctgctgtgggcatggaggctggaacttgtggttgaggcagggccatcccgatccttgctctacctggctagagtttcttctcatcagagcactgggacattaaacccaccttttcccagaaaaaaaaaaaaaaaaaaaaaaaaaaaaa

SEQ ID NO: 2552 - protein, 1236 aa, Homo sapiens
MGGALGPALLLTSLFGAWAGLGPGQGEQGMTVAVVFSSSGPPQAQFRARLTPQSFLDLPLEIQPLTVGVNTTNPSSLLTQICGLLGAAHVHGIVFEDNVDTEAVAQILDFISSQTHVPILSISGGSAVVLTPKEPGSAFLQLGVSLEQQLQVLFKVLEEYDWSAFAVITSLHPGHALFLEGVRAVADASHVSWRLLDVVTLELGPGGPRARTQRLLRQLDAPVFVAYCSREEAEVLFAEAAQAGLVGPGHVWLVPNLALGSTDAPPATFPVGLISVVTESWRLSLRQKVRDGVAILALGAHSYWRQHGTLPAPAGDCRVHPGPVSPAREAFYRHLLNVTWEGRDFSFSPGGYLVQPTMVVIALNRHRLWEMVGRWEHGVLYMKYPVWPRYSASLQPVVDSRHLTVATLEERPFVIVESPDPGTGGCVPNTVPCRRQSNHTFSSGDVAPYTKLCCKGFCIDILKKLARVVKFSYDLYLVTNGKHGKRVRGVWNGMIGEVYYKRADMAIGSLTINEERSEIVDFSVPFVETGISVMVARSNGTVSPSAFLEPYSPAVWVMMFVMCLTVVAITVFMFEYFSPVSYNQNLTRGKKSGGPAFTIGKSVWLLWALVFNNSVPIENPRGTTSKIMVLVWAFFAVIFLASYTANLAAFMIQEQYIDTVSGLSDKKFQRPQDQYPPFRFGTVPNGSTERNIRSNYRDMHTHMVKFNQRSVEDALTSLKMGKLDAFIYDAAVLNYMAGKDEGCKLVTIGSGKVFATTGYGIAMQKDSHWKRAIDLALLQFLGDGETQKLETVWLSGICQNEKNEVMSSKLDIDNMAGVFYMLLVAMGLALLVFAWEHLVYWKLRHSVPNSSQLDFLLAFSRGIYSCFSGVQSLASPPRQASPDLTASSAQASVLKMLQAARDMVTTAGVSSSLDRATRTIENWGGGRRAPPPSPCPTPRSGPSPCLPTPDPPPEPSPTGWGPPDGGRAALVRRAPQPPGRPPTPGPPLSDVSRVSRRPAWEARWPVRTGHCGRHLSASERPLSPARCHYSSFPRADRSGRPFLPLFPEPPELEDLPLLGPEQLARREALLHAAWARGSRPRHASLPSSVAEAFARPSSLPAGCTGPACARPDGHSACRRLAQAQSMCLPIYREACQEGEQAGAPAWQHRQHVCLHAHAHLPFCWGAVCPHLPPCASHGSWLSGAWGPLGHRGRTLGLGTGYRDSGGLDEISSVARGTQGFPGPCTWRRISSLESEV

SEQ ID NO: 2553 - DNA, 2425 bp, Homo sapiens
gcggccgccggtcctccctccacctcctcctcggccccccctcgcttccctcctcccacttcccgagctccggcgtcgtcccggccacgctcgacgctgctgcaggaacaaaggaagaccccgcggcggcggcggcgccacctccgcctgctgctccgacccgctcccggcccgcggcggcggcaccagggcgcccggctcagccttcccggaggcctcggcccggcctcatcgtgccggcttcgcgcgcgaacccggctttcgcatttgggaccctgcaggaaaaatatggctcaggagactaaccagaccccggggcccatgctgtgtagcacaggatgtggcttttatggaaatcctaggacaaatggaatgtgttcagtttgctacaaagaacatcttcagaggcagcaaaatagtggcagaatgagcccaatggggacagctagtggttccaacagtcctacctcagattctgcatctgtacagagagcagacactagcttaaacaactgtgaaggtgctgctggcagcacatctgaaaaatcaagaaatgtgcctgtggctgccttgcctgtaactcagcaaatgacagaaatgagcatttcaagagaggacaaaataactaccccgaaaacagaggtgtcagagccagttgtcactcagcccagtccatcagtttctcagcccagtacttctcagagtgaagaaaaagctcctgaattgcccaaaccaaagaaaaacagatgtttcatgtgcagaaagaaagttggtcttacagggtttgactgccgatgtggaaatttgttttgtggacttcaccgttactctgacaagcacaactgtccgtatgattacaaagcagaagctgcagcaaaaatcagaaaagagaatccagttgttgtggctgaaaaaattcagagaatataaattacttcttgtgaagagactgaaactttgtttttattttaatatatcgtaggaaaacattaaagagcagatgcatggccatttttctttgatgttctccagagttttacattacacttgtctgtcttataattgatattttaggatgtttgggtgtttgttacaggcagaattggatagatacagccctacaaatgtatatgccctcccctgaaaaaaattggatgaaaatctgcacagcaaagtgaaacacacagataataggaacaaaatgtagttcccatgtgccaaacaaaataaatgaaatctctgcatgtttgcagcatatctgccttttgggaatgtaatcaaggtataatctttggctagtgttatgtgcctgtatttttttaaaatggtacaccagaaaaggactggcagtctacttctaccatagttaaacttcaccctctttaatttcacaacatattctttggaagcaggaagaaatgctcataaagaggatcagaccttctttcccgtgaaaccagtatttggcgccatatataagcctggttaaattggtcatctaaagctgtcaaataagacattctgtgaaaggtaaacatcgaaactggttataagtaaaaccatcaagccaacaacagggtcttgagataacctttgaagcttattgtactggcctgcaccagaagatgtctgcattactcattgctaaaaatgtgtagcacagaactgcactaggattaatttgtttacaagaagaaatttaaactctacgtttggttttcacatacagcagctctattgaataacatgcatctgaattttaagttgcaaaggtatctgaataatttttcatgtgcatcttttgtcgaatgttttggttcaagaaagaatgtttaaagctttttaaaagacttcagttcttaatgtaactgtacccttctgcatggaaaatcataaccaacatggctgcagtagacttcttagtggtatccagcgccacttgcagagggctgctttatcatattgtacttgggtgtaggactctagtgttcttgggtgtattgcatgggctgcattatctacagcattgtacaataacaactagaaaaggcagtatacttcactgatgcttgtctggtaataatcacttctgtgttataatggaaggttttttgtgatgtatgaaacttgtgttttttatatataaatgagtatagttagtgttgtggtaatgcctgttttcatctgtaaatagttaagtatgtacacgaggcactacttctgatttattgcaatgttcagtcctagtttttacttttattcttaaagcattcagttttgctttcaattttatgtaccttagttctgagttagacctgcagatgtgtacagatagttcatatttatgtattgcacataatcatgctattcagcattgatgctatattgtattatgtaaataataaaagccatgtacagagggaaa

SEQ ID NO: 2554 - protein, 213 aa, Homo sapiens
MAQETNQTPGPMLCSTGCGFYGNPRTNGMCSVCYKEHLQRQQNSGRMSPMGTASGSNSPTSDSASVQRADTSLNNCEGAAGSTSEKSRNVPVAALPVTQQMTEMSISREDKITTPKTEVSEPVVTQPSPSVSQPSTSQSEEKAPELPKPKKNRCFMCRKKVGLTGFDCRCGNLFCGLHRYSDKHNCPYDYKAEAAAKIRKENPVVVAEKIQRI

SEQ ID NO: 2555 - DNA, 2619 bp, Homo sapiens
gaagcaaggaggcggcggcggccgagcgagtggcgagtagtggaaacgttgcttctgaggggagcccaagatgaccggttctaacgagttcaagctgaaccagccacccgaggatggcatctcctccgtgaagttcagccccaacacctcccagttcctgcttgtctcctcctgggacacgtccgtgcgtctctacgatgtgccggccaactccatgcggctcaagtaccagcacaccggcgccgtcctggactgcgccttctacgatccaacgcatgcctggagtggaggactagatcatcaattgaaaatgcatgatttgaacactgatcaagaaaatcttgttgggacccatgatgcccctatcagatgtgttgaatactgtccagaagtgaatgtgatggtcactggaagttgggatcagacagttaaactgtgggatcccagaactccttgtaatgctgggaccttctctcagcctgaaaaggtatataccctctcagtgtctggagaccggctgattgtgggaacagcaggccgcagagtgttggtgtgggacttacggaacatgggttacgtgcagcagcgcagggagtccagcctgaaataccagactcgctgcatacgagcgtttccaaacaagcagggttatgtattaagctctattgaaggccgagtggcagttgagtatttggacccaagccctgaggtacagaagaagaagtatgccttcaaatgtcacagactaaaagaaaataatattgagcagatttacccagtcaatgccatttcttttcacaatatccacaatacatttgccacaggtggttctgatggctttgtaaatatttgggatccatttaacaaaaagcgactgtgccaattccatcggtaccccacgagcatcgcatcacttgccttcagtaatgatgggactacgcttgcaatagcgtcatcatatatgtatgaaatggatgacacagaacatcctgaagatggtatcttcattcgccaagtgacagatgcagaaacaaaacccaagtcaccatgtacttgacaagatttcatttacttaagtgccatgttgatgataataaaacaattcgtactccccaatggtggatttattactattaaagaaaccagggaaaatattaattttaatattataacaacctgaaaataatggaaaagaggtttttgaatttttttttttaaataaacaccttcttaagtgcatgagatggtttgatggtttgctgcattaaaggtatttgggcaaacaaaattggagggcaagtgactgcagttttgagaatcagttttgaccttgatgattttttgtttccactgtggaaataaatgtttgtaaataagtgtaataaaaatccctttgcattctttctggaccttaaatggtagaggaaaaggctcgtgagccatttgtttcttttgctggttatagttgctaattctaaagctgcttcagactgcttcatgaggaggttaatctacaattaaacaatatttcctcttggccgtccattattttctgaagcagatggttcatcatttcctgggctgttaaacaaagcgaggttaaggttagactcttgggaatcagctagttttcaatcttattagggtgcagaaggaaaactaataagaaaacctcctaatatcattttgtgactgtaaacaattatttattagcaaacaattgatcccagaagggcaaattgtttgagtcagtaatgagctgagaaaagacagagcatatctgtgtatttggaaaaataattgtaacgtaattgcagtgcatttagacaggcatctatttggacctgtttctatctctaaatgaatttttggaaacattaatgaggtttacatatttctctgacatttatatagttcttatgtccatttcagttgaccagccgctggtgattaaagttaaaaagaaaaaaattatagtgagaatgagattcatttcaatgtaatgcactaaagcagaacacgaacttagcttggcctattctaggtagttccaaatagtatttttgttgtcaaactttaaaatttatattaatttgcaaatgtatgtctctgagtaggacttggacctttcctgagatttattttatccgtgatgtattttttttaattcttttgatacagagaagggtctttttttttttaagtatttcagtgaaaacttggtgtaagtctgaacccatcttttgaaatgtattttcttcattgcaggtccacctaatcatcctgtgaaagtggtttctctatggaaagctttgtttgcttcctacaaatacatgcttattccttaagggatgtgttagagttactgtggatttctctgttttctgtcttacaagaaacttgtctatgtaccttaatactttgtttaggatgaggagtctttgtgtccctgtacagtagtctgacgtatttccccttctgtcccctagtaagcccagttgctgtatctgaacagtttgagctctttttgtaatatactctaaacctgttatttctgtgctaataaacgagatgcagaacccttgaaaaaaaaaaaaaaaaaaaaaaaaaaaaaaaaaa

SEQ ID NO: 2556 - protein, 328 aa, Homo sapiens
MTGSNEFKLNQPPEDGISSVKFSPNTSQFLLVSSWDTSVRLYDVPANSMRLKYQHTGAVLDCAFYDPTHAWSGGLDHQLKMHDLNTDQENLVGTHDAPIRCVEYCPEVNVMVTGSWDQTVKLWDPRTPCNAGTFSQPEKVYTLSVSGDRLIVGTAGRRVLVWDLRNMGYVQQRRESSLKYQTRCIRAFPNKQGYVLSSIEGRVAVEYLDPSPEVQKKKYAFKCHRLKENNIEQIYPVNAISFHNIHNTFATGGSDGFVNIWDPFNKKRLCQFHRYPTSIASLAFSNDGTTLAIASSYMYEMDDTEHPEDGIFIRQVTDAETKPKSPCT

SEQ ID NO: 2557 - DNA, 3385 bp, Homo sapiens
agcgggatgtgctctcactgctcccaaaaatggcggacgcattcggagatgagctgttcagcgtgttcgagggcgactcgaccactgcggcgggaaccaaaaaagacaaggaaaaggacaaggggaaatggaaggggcctccagggtctgcagacaaggcagggaaacgttttgatggtaaattacaatcagaatcaactaataatggaaaaaataagagagatgtagatttcgaaggtacagatgaacccatttttggaaagaagcccaggatagaagagtcaataactgaagacttaagtttggcagacctgatgcccagagtcaaggtacaatcagttgaaactgttgaagggtgtacacatgaggttgcacttcctgcagaagaggattatttaccacttaaaccacgagttggaaaagctgctaaggaatacccgttcattcttgatgcttttcaaagagaggccattcagtgtgttgacaataatcagtctgttctagtatctgcacatacctcagcgggaaaaacagtatgcgccgagtatgccattgcattggccttaagggaaaagcagcgtgtaatatttaccagcccaattaaggctctgagtaaccaaaaataccgtgaaatgtatgaagaatttcaagatgttggtttgatgactggtgatgttactattaatcctacggcatcttgtcttgttatgaccacagagattttgagaagtatgctttacagaggttccgaagttatgagagaagttgcttgggttatatttgatgaaattcattatatgagagattcagaacgtggtgtagtatgggaagaaactattattttgcttcctgataacgtccactatgtctttctttcggctactattccaaatgcccgacagtttgctgaatggatttgccatttacataaacagccttgtcatgttatttacacagattatcggcccactccattgcaacactacatttttccagcagggggagatggcctgcatcttgtggttgatgaaaatggtgacttcagagaagataattttaatactgcaatgcaagtgcttcgagatgcaggtgatttggccaaaggagaccagaaagggcggaaaggaggaacaaaaggaccatcaaatgttttcaaaattgtgaagatgattatggaaagaaatttccaacctgtgattattttcagttttagtaagaaagattgtgaagcctatgcacttcaaatgaccaaattagatttcaacacagatgaagaaaagaagatggttgaagaagtattcagtaatgcaattgattgcttatccgatgaagataaaaaactccctcaggtagaacatgtacttcctcttttgaagaggggaattggtattcaccatggtggtttacttcctattttgaaagaaactatagaaattctcttttctgaaggattgataaaggccttatttgccacggagacctttgctatgggaattaacatgccagctagaactgttttatttacaaatgcccgcaaatttgatgggaaggatttccgatggatttcttctggtgaatacattcagatgtctggtcgtgctggaaggagaggaatggatgatagaggaattgtaattcttatggtagatgaaaagatgagcccaacaattggaaaacaattacttaagggctccgctgatcctctaaatagtgctttccatttgacctacaacatggttttgaacttactacgtgtagaagaaattaatcctgagtacatgttggaaaaatccttctaccagtttcagcattatagagcaattccaggagtagtagagaaggtaaagaattcagaagaacagtataataaaatagtaattcccaatgaagaaagtgtggttatctattataagattagacagcagcttgccaaattgggtaaagaaattgaagaatatattcacaaaccaaaatactgcttaccttttctacaaccaggtcgtttggtaaaggtaaagaatgaaggagatgactttggctggggagtagtggtgaatttctcaaaaaagtcaaatgttaagcctaactctggtgaactggatcctttgtatgtagtagaagtacttctgcgctgtagcaaagagagcttgaaaaattcagctacagaagctgcaaaaccagctaaacctgatgagaaaggagagatgcaggttgtcccagttttggtgcatctcctgtctgctatcagcagtgttaggctttacattcctaaagaccttcggccggtggacaatagacagagtgttttaaaatcaatacaggaagttcagaaacgttttcctgacggcatccccttattagaccctattgatgatatgggcattcaagatcaagggctgaaaaaagtcattcagaaagtagaagcttttgagcatcgaatgtattctcatccacttcacaatgatccaaatttggaaactgtgtatacgctttgtgaaaaaaaagcacagattgcaatagatattaaatctgcaaagcgagaactgaagaaagcaagaacagtcctacaaatggatgaactcaaatgtcgcaaacgtgttttaagaaggttgggatttgctacttcttctgatgtaatagagatgaaaggacgagtggcttgtgagataagcagtgctgatgagctccttctaactgagatgatgtttaatggccttttcaatgacatttctgcagaacaggcaacagcattattaagctgctttgtgtttcaagagaattctagtgagatgcccaaattaacagaacaattagcaggaccacttcgtcaaatgcaggaatgtgctaaaagaattgcaaaagtttcagcagaagccaaattggaaattgatgaggaaacttatctaagctcatttaaacctcacttaatggatgtagtatatacatgggcaactggagctacatttgcccatatctgcaaaatgacagatgtctttgaaggcagcataattcgttgtatgaggcgcctggaagaattgcttcgacaaatgtgtcaagcagcaaaagccattggaaacactgagctggaaaataaatttgcagaaggaatcaccaaaatcaagagagatattgtgtttgctgccagcctctacttgtagagtcagctaaaggaatgtgagattttaaattattgaccacctgtttgattacagttgactacaaatgcctgcaagtgtggatttggttctcccatacattttaatatgtattatatttaaatcaaacatcattcatagaaagcatattacatacatgtttatacataagcattacatttttttaataaaaatgtatacaggtggggcaccgaaaaaaaaaaaaaaaa

SEQ ID NO: 2558 - protein, 1042 aa, Homo sapiens
MADAFGDELFSVFEGDSTTAAGTKKDKEKDKGKWKGPPGSADKAGKRFDGKLQSESTNNGKNKRDVDFEGTDEPIFGKKPRIEESITEDLSLADLMPRVKVQSVETVEGCTHEVALPAEEDYLPLKPRVGKAAKEYPFILDAFQREAIQCVDNNQSVLVSAHTSAGKTVCAEYAIALALREKQRVIFTSPIKALSNQKYREMYEEFQDVGLMTGDVTINPTASCLVMTTEILRSMLYRGSEVMREVAWVIFDEIHYMRDSERGVVWEETIILLPDNVHYVFLSATIPNARQFAEWICHLHKQPCHVIYTDYRPTPLQHYIFPAGGDGLHLVVDENGDFREDNFNTAMQVLRDAGDLAKGDQKGRKGGTKGPSNVFKIVKMIMERNFQPVIIFSFSKKDCEAYALQMTKLDFNTDEEKKMVEEVFSNAIDCLSDEDKKLPQVEHVLPLLKRGIGIHHGGLLPILKETIEILFSEGLIKALFATETFAMGINMPARTVLFTNARKFDGKDFRWISSGEYIQMSGRAGRRGMDDRGIVILMVDEKMSPTIGKQLLKGSADPLNSAFHLTYNMVLNLLRVEEINPEYMLEKSFYQFQHYRAIPGVVEKVKNSEEQYNKIVIPNEESVVIYYKIRQQLAKLGKEIEEYIHKPKYCLPFLQPGRLVKVKNEGDDFGWGVVVNFSKKSNVKPNSGELDPLYVVEVLLRCSKESLKNSATEAAKPAKPDEKGEMQVVPVLVHLLSAISSVRLYIPKDLRPVDNRQSVLKSIQEVQKRFPDGIPLLDPIDDMGIQDQGLKKVIQKVEAFEHRMYSHPLHNDPNLETVYTLCEKKAQIAIDIKSAKRELKKARTVLQMDELKCRKRVLRRLGFATSSDVIEMKGRVACEISSADELLLTEMMFNGLFNDISAEQATALLSCFVFQENSSEMPKLTEQLAGPLRQMQECAKRIAKVSAEAKLEIDEETYLSSFKPHLMDVVYTWATGATFAHICKMTDVFEGSIIRCMRRLEELLRQMCQAAKAIGNTELENKFAEGITKIKRDIVFAASLYL

SEQ ID NO: 2559 - DNA, 3260 bp, Homo sapiens
ggcacgaggcagcaactatgaaataatcgtagtatgagaggcagagatcggggcgagacaatggggatgtgggcgcgggagccccgttccggcttagcagcacctcccagccccgcagaataaaaccgatcgcgccccctccgcgcgcgccctcccccgagtgcggagcgggaggaggcggcggcggccgaggaggaggaggaggaggccccggaggaggaggcgttggaggtcgaggcggaggcggaggaggaggaggccgaggcgccggaggaggccgaggcgccggagcaggaggaggccggccggaggcggcatgagacgagcgtggcggccgcggctgctcggggccgcgctggttgcccattgacagcggcgtctgcagctcgcttcaagatggccgcttggctcgcattcattttctgctgaacgacttttaactttcattgtcttttccgcccgcttcgatcgcctcgcgccggctgctctttccgggattttttatcaagcagaaatgcatcgaacaacgagaatcaagatcactgagctaaatccccacctgatgtgtgtgctttgtggagggtacttcattgatgccacaaccataatagaatgtctacattccttctgtaaaacgtgtattgttcgttacctggagaccagcaagtattgtcctatttgtgatgtccaagttcacaagaccagaccactactgaatataaggtcagataaaactctccaagatattgtatacaaattagttccagggcttttcaaaaatgaaatgaagagaagaagggatttttatgcagctcatccttctgctgatgctgccaatggctctaatgaagatagaggagaggttgcagatgaagataagagaattataactgatgatgagataataagcttatccattgaattctttgaccagaacagattggatcggaaagtaaacaaagacaaagagaaatctaaggaggaggtgaatgataaaagatacttacgatgcccagcagcaatgactgtgatgcacttaagaaagtttctcagaagtaaaatggacatacctaatactttccagattgatgtcatgtatgaggaggaacctttaaaggattattatacactaatggatattgcctacatttatacctggagaaggaatggtccacttccattgaaatacagagttcgacctacttgtaaaagaatgaagatcagtcaccagagagatggactgacaaatgctggagaactggaaagtgactctgggagtgacaaggccaacagcccagcaggaggtattccctccacctcttcttgtttgcctagccccagtactccagtgcagtctcctcatccacagtttcctcacatttccagtactatgaatggaaccagcaacagccccagcggtaaccaccaatcttcttttgccaatagacctcgaaaatcatcagtaaatgggtcatcagcaacttcttctggttgatacctgagactgttaaggaaaaaaattttaaacccctgatttatatagatatcttcatgccattacagctttctagatgctaatacatgtgactatcgtccaatttgctttcttttgtagtgacattaaatttggctataaaagatggactacatgtgatactcctatggacgttaattgaaaagaaagattgttgttataaagaattggtttcttggaaagcaggcaagactttttctctgtgttaggaaagatgggaaatggtttctgtaaccattgtttggatttggaagtactctgcagtggacataagcattgggccatagtttgttaatctcaactaacgcctacattacattctccttgatcgttcttgttattacgctgttttgtgaacctgtagaaaacaagtgctttttatcttgaaattcaaccaacggaaagaatatgcatagaataatgcattctatgtagccatgtcactgtgaataacgatttcttgcatatttagccattttgattcctgtttgatttatacttctctgttgctacgcaaaaccgatcaaagaaaagtgaacttcagttttacaatctgtatgcctaaaagcgggtactaccgtttattttactgacttgtttaaatgattcgcttttgtaagaatcagatggcattatgcttgttgtacaatgccatattggtatatgacataacaggaaacagtattgtatgatatatttataaatgctataaagaaatattgtgtttcatgcattcagaaatgattgttaaaattctcccaactggttcgacctttgcagatacccataacctatgttgagccttgcttaccagcaaagaatatttttaatgtggatatctaattctaaagtctgttccattagaagcaattggcacatctttctatactttatatacttttctccagtaatacatgtttactttaaaaattgttgcagtgaagaaaaacctttaactgagaaatatggaaaccgtcttaattttccattggctatgatggaattaatattgtattttaaaaatgcatattgatcactataattctaaaacaattttttaaataaaccagcaggttgctaaaagaaggcattttatctaaagttattttaataggtggtatagcagtaattttaaatttaagagttgcttttacagttaacaatggaatatgccttctctgctatgtctgaaaatagaagctatttattatgagcttctacaggtatttttaaatagagcaagcatgttgaatttaaaatatgaataaccccacccaacaattttcagtttattttttgctttggtcgaacttggtgtgtgttcatcacccatcagttatttgtgagggtgtttattctatatgaatattgtttcatgtttgtatgggaaaattgtagctaaacatttcattgtccccagtctgcaaaagaagcacaattctattgctttgtcttgcttatagtcattaaatcattacttttacatatattgctgttacttctgctttctttaaaaatatagtaaaggatgttttatgaagtcacaagatacatatatttttattttgacctaaatttgtacagtcccattgtaagtgttgtttctaattatagatgtaaaatgaaatttcatttgtaattggaaaaaatccaataaaaaggatattcatttagaaaaaaaaaaaaaaaaaaaaaaaaaaaaaaaaaaaaaaaaaaaaaaaaaaaa

SEQ ID NO: 2560 - protein, 326 aa, Homo sapiens
MHRTTRIKITELNPHLMCVLCGGYFIDATTIIECLHSFCKTCIVRYLETSKYCPICDVQVHKTRPLLNIRSDKTLQDIVYKLVPGLFKNEMKRRRDFYAAHPSADAANGSNEDRGEVADEDKRIITDDEIISLSIEFFDQNRLDRKVNKDKEKSKEEVNDKRYLRCPAAMTVMHLRKFLRSKMDIPNTFQIDVMYEEEPLKDYYTLMDIAYIYTWRRNGPLPLKYRVRPTCKRMKISHQRDGLTNAGELESDSGSDKANSPAGGIPSTSSCLPSPSTPVQSPHPQFPHISSTMNGTSNSPSGNHQSSFANRPRKSSVNGSSATSSG

SEQ ID NO: 2561 - DNA, 1554 bp, Homo sapiens
cgaaaaagaagcagtcctgggctgtacccggcgcagctgggagcggctgcttcctccggggtcgtatctccgcccggcatggggctgctggacctttgcgaggaagtgttcggcaccgccgacctttaccgggtgctgggcgtgcgacgcgaggcctccgacggcgaggtccgacgaggctaccacaaggtgtccctgcaggtacacccggaccgggtgggcgagggcgacaaggaggacgccacccgccgcttccagatcctgggaaaagtctattccgttctcagtgacagagaacagagagcagtgtacgatgagcagggaacagtggacgaggactctcctgtgctcacccaagaccgagactgggaggcgtattggcggctactctttaaaaagatatctttagaggacattcaagcttttgaaaagacatacaaaggttcggaagaagagctggctgatattaagcaggcctatctggacttcaagggtgacatggatcagatcatggagtctgtgctttgcgtgcagtacacagaggaacccaggataaggaatatcattcagcaagctattgacgccggagaggtcccatcctataatgcctttgtcaaagaatcgaaacaaaagatgaatgcaaggaaaaggagggctcaggaagaggccaaagaagcagaaatgagcagaaaggagttggggcttgatgaaggcgtggatagcctgaaggcagccattcagagcagacaaaaggatcggcaaaaggaaatggacaattttctggctcagatggaagcaaagtactgcaaatcttccaaaggaggagggaaaaaatctgctctcaagaaagaaaagaaataatggaatttttctcttcaaaggtccttaggtgtaaattgatgccatcgtaggcaaggtgcaggcaagatttgaaggcaaaagtcaattcagctcttgagaaaaggtgtctttccagcctgaatttttcagattgactagaccaagcagaatctctcaacctgatcttagtatttcctagaaagcacttgacattgtgtgaggtctcacctgaaggaacttggtggtgacatttgggagggtggagggaggcagtgtccttcctgacagcacttgcctccatggatcttctgtacacagaactcttatctaggatgtggttctgttcatgctgctttctgcgatgtgcgtgtctgttagaataggctctctacccagctagaacaccttccagacacttgctggacagctatcttccacatacttcccagtttacatttggtcttaatgatcttgaatagatcctctcttcattttactcagccaggttttgtactgatgtacaggtgttaaattacttcaagcatttttgtaagaggtgtatataattcaataaaaaaggtaagacatgatgattaaaaaaaaaaaaaaaaaaaaaaaaaaaaaaaaaaaaaaaaaaaaaaaccaaaaaaaaaaaaaaaaaaaaaaaaaaaaaaaaaaaaaattaaaaaaaaaaaaaaaaaaaaaaaaaaaaaa

SEQ ID NO: 2562 - protein, 260 aa, Homo sapiens
MGLLDLCEEVFGTADLYRVLGVRREASDGEVRRGYHKVSLQVHPDRVGEGDKEDATRRFQILGKVYSVLSDREQRAVYDEQGTVDEDSPVLTQDRDWEAYWRLLFKKISLEDIQAFEKTYKGSEEELADIKQAYLDFKGDMDQIMESVLCVQYTEEPRIRNIIQQAIDAGEVPSYNAFVKESKQKMNARKRRAQEEAKEAEMSRKELGLDEGVDSLKAAIQSRQKDRQKEMDNFLAQMEAKYCKSSKGGGKKSALKKEKK

SEQ ID NO: 2563 - DNA, 3548 bp, Homo sapiens
agccggggcccccgccgccgccggagcgacaggtgatttggcttctgcacagttaggaggagcaccaaaccgatgggaggttttgtcagccacacctacaactataaaagatgaagctggtaatctagtccagattccaagtgctgctacttcaagtgggcagtatgttcttccccttcagaatttgcagaatcaacaaatattttccgttgcaccaggatcagattcatcaaatggtgcagtgtccagtgttcaatatcaagtgataccacagatccagtcagcagatggtcagcaggttcaaattggtttcacaggctcttcagataatgggggtataaatcaagaaagcagtcaaattcagatcattcctggctctaatcaaaccttacttgcctctggaacaccttctgctaacatccagaatctcataccacagactggtcaagtccaggttcagggagttgcaattggtggttcatcttttcctggtcaaacccaagtagttgctaatgtgcctcttggtctgccaggaaatattacgtttgtaccaatcaatagtgtcgatctagattctttgggactctcgggcagttctcagacaatgactgcaggcattaatgccgacggacatttgataaacacaggacaagctatggatagttcagacaattcagaaaggactggtgagcgggtttctcctgatattaatgaaactaatactgatacagatttatttgtgccaacatcctcttcatcacagttgcctgttacgatagatagtacaggtatattacaacaaaacacaaatagcttgactacatctagtgggcaggttcattcttcagatcttcagggaaattatatccagtcgcctgtttctgaagagacacaggcacagaatattcaggtttctacagcacagcctgttgtacagcatctacaacttcaagagtctcagcagccaaccagtcaagcccaaattgtgcaaggtattacaccacagacaatccatggtgtgcaagccagtggtcaaaatatatcacaacaggctttgcaaaatcttcagttgcagctgaatcctggaacctttttaattcaggcacagacagtgaccccttctggacaggtaacttggcaaacgtttcaagtacaaggggtccagaacttgcagaatttgcaaatacagaatactgctgcccaacaaataactctgacgcctgttcaaaccctcacacttggtcaagttgcggcaggtggagccttcacttcaactccagttagtctaagcactggtcagttgccaaatctacaaacagttacagtgaactctatagattctgctggtatacagctacatccaggagagaatgctgacagtcctgcagatattaggatcaaggaagaagaacctgatcctgaagagtggcagctcagtggtgattctaccttgaataccaatgacctaacacacttaagagtacaggtggtagatgaagaaggggaccaacaacatcaagaaggaaaaagacttcggagggtagcttgcacctgtcccaactgtaaagaaggtggtggaagaggtaccaatcttgggaaaaagaagcaacacatttgtcatataccaggatgtggtaaagtctatgggaagacctcacatctgagagctcatctgcgttggcattctggagaacgcccttttgtttgtaactggatgtactgtggtaaaagatttactcgaagtgatgaattacagaggcacagaagaacacatacaggtgagaagaaatttgtttgtccagaatgttcaaaacgctttatgagaagtgaccaccttgccaaacatattaaaacacaccagaataaaaaaggtattcactctagcagtacagtgctggcatctgtggaagctgcgcgagatgatactttgattactgcaggaggaacaacgcttatccttgcaaagattcaacaaggttctgtttcagggataggaactgttaatacttccgccaccagcaatcaagatatccttaccaacactgaaatacctttacagcttgtcacagtttctggaaatgagacaatggagtaaatattacacaaatacttattcattgtggttatttttatacagtagtgagaagaatattgttcctaagttcttagatatctttttattgatgtgcaaaaatttttggattgacagtaacttggttatacatgacactgaaatgccttactttgtatgatattccatagtatattaaaaatggtaaaattgcatgggttttgtaggtacttttggaatctagaagaaatgaaattttaccaagttatataaagagaaaattgaatttaacaatgcgaatggtagtctaaccaaatgcatcaatcctgtgtggtttagtgtaaaaatgagaacatgttggtatttatctattgtaagataaaaaagctggtgggtgaaagaaatcatgttatgataaaaaattttgtaattttcttgatgactggaatttttattatgcataactgacaaatcaagtttccaagcaaatgttacatagtgtaggctttacttagcttatcaatttgtcattttgaagctaattattttaattaggttaactatgtacaatattttaagcattactcttgtaagattttgaaaactacattttaacatggaactctagggatagtcaccttttaaatcctgttgaaaagccatgtttaagatttaatttgccaaaataatgtcttgttaatattctttcaataacgaagttgggcaatataaccaatgtttaaaaaagtttaaaatgtataagttgaggcatttgggtggtaagagaatgttatagtgaattatcccttttcttgactattggaggaccaaaaaataaggtgtattgcgtcttagcagtgattttatccaatcttgtttccaaaaaccatggtctcccagggccttaaaagccatcatgtaaattaccagtaaagtgtaacatatgcaaacataacaaaatcacttccatagtgacgatactccaaccatatggatattagtcatagaagaactagaggttttatgatatttttttaagtcttttttttttgtctaggtagtcagtctgcacttaaatatcaatcattttccttttttgcttcttcccttaaaatttatatgtatccagtacatttaattgagaagcgtatgttttttattatgctgtattttctttttattttttaattattgtttatattttcaattcaaaaatgtacaaaataaagttacattgctggtctgtgtaagagctatacagttttcctaaatgtatacctgtaactgcagcagttcacctatttgcaaaaatttggaattctgttcatttgttattcttaagaccacctcaaatttaaaggctaccttattgtacgtttaaagtgtattataacagtgtggtagttaataaaacactatttttttttcttttgaaaaaaaaaaaaaaaaaaaaaaaaaaaaaaaaaaaaaaaaaaaa

SEQ ID NO: 2564 - protein, 697 aa, Homo sapiens
AGAPAAAGATGDLASAQLGGAPNRWEVLSATPTTIKDEAGNLVQIPSAATSSGQYVLPLQNLQNQQIFSVAPGSDSSNGAVSSVQYQVIPQIQSADGQQVQIGFTGSSDNGGINQESSQIQIIPGSNQTLLASGTPSANIQNLIPQTGQVQVQGVAIGGSSFPGQTQVVANVPLGLPGNITFVPINSVDLDSLGLSGSSQTMTAGINADGHLINTGQAMDSSDNSERTGERVSPDINETNTDTDLFVPTSSSSQLPVTIDSTGILQQNTNSLTTSSGQVHSSDLQGNYIQSPVSEETQAQNIQVSTAQPVVQHLQLQESQQPTSQAQIVQGITPQTIHGVQASGQNISQQALQNLQLQLNPGTFLIQAQTVTPSGQVTWQTFQVQGVQNLQNLQIQNTAAQQITLTPVQTLTLGQVAAGGAFTSTPVSLSTGQLPNLQTVTVNSIDSAGIQLHPGENADSPADIRIKEEEPDPEEWQLSGDSTLNTNDLTHLRVQVVDEEGDQQHQEGKRLRRVACTCPNCKEGGGRGTNLGKKKQHICHIPGCGKVYGKTSHLRAHLRWHSGERPFVCNWMYCGKRFTRSDELQRHRRTHTGEKKFVCPECSKRFMRSDHLAKHIKTHQNKKGIHSSSTVLASVEAARDDTLITAGGTTLILAKIQQGSVSGIGTVNTSATSNQDILTNTEIPLQLVTVSGNETME

SEQ ID NO: 2565 - DNA, 2265 bp, Homo sapiens
agtcctgcgatttcgggtgtagagggagcaggggcctgcggggacctggtgtgggtggagtggggacaagcggtggagaagggtacgccagggtcgctgagagactctgttctccctggagggactggttgccatgagagcagccgtctgaggggacgcagcctgcactacgcgccccaagaggctgtgcgtggcgagcaggtcacgtgacgggagcgcgggctttggaaggcggctgaacgtcaggccacccgccgctaagctgagaagggagagcgagcttaggaccgcctgcccggggcaaccccgaaccaagctttagccgccgaggccgcgtgtcccaaaggccagtcatccctcctctgtgttgccatgggaattcaaggcctggccaaactaattgctgatgtggcccccagtgccatccgggagaatgacatcaagagctactttggccgtaaggtggccattgatgcctctatgagcatttatcagttcctgattgctgttcgccagggtggggatgtgctgcagaatgaggagggtgagaccaccagccacctgatgggcatgttctaccgcaccattcgcatgatggagaacggcatcaagcccgtgtatgtctttgatggcaagccgccacagctcaagtcaggcgagctggccaaacgcagtgagcggcgggctgaggcagagaagcagctgcagcaggctcaggctgctggggccgagcaggaggtggaaaaattcactaagcggctggtgaaggtcactaagcagcacaatgatgagtgcaaacatctgctgagcctcatgggcatcccttatcttgatgcacccagtgaggcagaggccagctgtgctgccctggtgaaggctggcaaagtctatgctgcggctaccgaggacatggactgcctcaccttcggcagccctgtgctaatgcgacacctgactgccagtgaagccaaaaagctgccaatccaggaattccacctgagccggattctgcaggagctgggcctgaaccaggaacagtttgtggatctgtgcatcctgctaggcagtgactactgtgagagtatccggggtattgggcccaagcgggctgtggacctcatccagaagcacaagagcatcgaggagatcgtgcggcgacttgaccccaacaagtaccctgtgccagaaaattggctccacaaggaggctcaccagctcttcttggaacctgaggtgctggacccagagtctgtggagctgaagtggagcgagccaaatgaagaagagctgatcaagttcatgtgtggtgaaaagcagttctctgaggagcgaatccgcagtggggtcaagaggctgagtaagagccgccaaggcagcacccagggccgcctggatgatttcttcaaggtgaccggctcactctcttcagctaagcgcaaggagccagaacccaagggatccactaagaagaaggcaaagactggggcagcagggaagtttaaaaggggaaaataaatgtgtttccccattatacctccttcaccccagaatatttgccgtcttgtacccttaagagctacagctagagaaaccttcacggggtggagagaggattctaaggcttttctagcgtgacccttttcagtagtgctagtcccttttttacttgatcttaatggcaagaaggccacagaggtacttttccttttttagctcaggaaaatatgtcaggctcaaaccacttctcaggcagtttaatggacactaagtccattgttacatgaaagtgatagatagcaacaagttttggagaagagagagggagataaaagggggagacaaaagatgtacagaaatgatttcctggctggccaactggtggccagtgggaggtgatggtggacctagactgtgcttttctgtcttgttcagccttgacccaccttgagagagagccaccaggaaggcgcatcttagcagatgggaggaactgctgagagaagatgggcagaaagctggagcccctggagttggctgtgtctgtgtttgtgactgattactggctgtgtcttgggtgggcagaaactcgaacttgctatgtaatttgtgtctagttattcagaggagtaagatggtgatgttcacctggcaatcagctgagttgagactttggaataagacactggttttcatgcgctgtttttgttttaaagttatgaagaaaaaagtcaataaaattctaaaagtaaaaaaaaaaaaaaaaaa

SEQ ID NO: 2566 - protein, 380 aa, Homo sapiens
MGIQGLAKLIADVAPSAIRENDIKSYFGRKVAIDASMSIYQFLIAVRQGGDVLQNEEGETTSHLMGMFYRTIRMMENGIKPVYVFDGKPPQLKSGELAKRSERRAEAEKQLQQAQAAGAEQEVEKFTKRLVKVTKQHNDECKHLLSLMGIPYLDAPSEAEASCAALVKAGKVYAAATEDMDCLTFGSPVLMRHLTASEAKKLPIQEFHLSRILQELGLNQEQFVDLCILLGSDYCESIRGIGPKRAVDLIQKHKSIEEIVRRLDPNKYPVPENWLHKEAHQLFLEPEVLDPESVELKWSEPNEEELIKFMCGEKQFSEERIRSGVKRLSKSRQGSTQGRLDDFFKVTGSLSSAKRKEPEPKGSTKKKAKTGAAGKFKRGK

SEQ ID NO: 2567 - DNA, 2426 bp, Homo sapiens
ggcacgaggggcttctgtcaccttcctcacggaccttggtcacggccgcaggtgaccccttagcccagctccagtgggcgggtggcagggtcatggaggacgctggcggcggcgaggagaccccggccccggaggccccgcacccccctcagctcgcgcctccggaggagcaggggttgctcttccaggaggaaaccatcgatcttggcggagatgagtttggatccgaagagaacgagaccgcatcggaaggctcgagtcctctcgcggacaagctgaacgaacacatgatggagagcgtcctcatctctgactcccccaacagcgagggcgacgcgggcgacctgggccgagtgcgggacgaagctgagcccggaggggaaggcgacccaggcccggagcccgcgggcaccccgagtcccagcggcgaggccgacggcgactgtgcccccgaggacgcggcacccagtagcggaggggccccgaggcaggacgcggcccgcgaggtcccaggcagcgaagccgcgcgcccggagcaggagcctcccgttgcggagccggtcccggtgtgcaccatcttcagccagcgcgcgcccccagcctccggggacggcttcgagccgcagatggtgaagtcgcccagcttcggtggcgccagcgaggcctcggccaggacaccgccccaggtcgtgcagcccagccccagcctcagcacgttcttcggagacacggccgccagccactccttggcctcggacttcttcgactcctttactacctccgccttcatttccgtcagcaatcccggcgcgggctccccggcccccgccagcccgcctcccctcgctgtgcccgggaccgaggggcgccccgaacccgtggccatgcgagggccccaggcagctgcgcccccggcgtcgccagagcctttcgcgcacatccaggcagtgtttgcagggagtgacgacccctttgccaccgccctgagcatgagcgagatggaccggaggaacgacgcctggcttcccggcgaggctacgcgtggagtcctgcgggccgtggccacccagcagcgcggcgccgtgttcgtggacaaggagaacctcaccatgccgggcctcaggttcgacaacatccagggagatgcagttaaagacttgatgcttcgctttctgggtgaaaaagctgcagcaaagagacaagtcctaaatgccgactcagtggaacaatcttttgttggattgaaacagctaatcagctgcagaaactggagggcagcagtggacctgtgcggacgtctcctcacagcccacggccagggctacggcaagagcgggctgctcaccagccacacgacagattcactgcagctctggtttgtcaggctggcactactagtgaagttgggccttttccagaatgctgagatggaatttgaacccttcggaaatcttgatcagccagatctttattacgagtactacccgcacgtgtaccctgggcgcaggggctccatggtccccttctcgatgcgcatcttgcacgcggagcttcagcagtacctggggaacccacaggagtcgctggatagactgcacaaggtgaagactgtctgcagcaagatcctggccaatttggagcaaggcttagcagaagacggcggcatgagcagcgtgactcaggagggcagacaagcctctatccggctgtggaggtcacgtctgggccgggtgatgtactccatggcaaactgtctgctcctgatgaaggattatgtgctggccgtggatgcgtatcattcggttatcaagtattacccagagcaagagccccagctgctcagcggcatcggccggatttccctccagattggagacataaaaacagctgaaaagtattttcaagacgttgagaaagtaacacagaaattagacggactacagggtaaaatcatggttttgatgaacagcgcgttccttcacctcgggcagaataactttgcagaagcccacaggttcttcacagagatcttaaggatggatccaagaaacgcagtggccaacaacaacgctgccgtgtgtctgctctacctgggcaagctcaaggactccctgcggcagctggaggccatggtccagcaggaccccaggcactacctgcacgagagcgtgctcttcaacctgaccaccatgtacgagctggagtcctcacggagcatgcagaagaaacaggccctgctggaggctgtcgccggcaaggagggggacagcttcaacacacagtgcctcaagctggcctagctgcctccaacacactacgtcagaaggacccgggtctttgaaactgtgtcttgaagctaatgtattaatgtgacatggaggaactcaataaaactcctgcttcaaaaaaaaaaaaaaaaaaaaaaa

SEQ ID NO: 2568 - protein, 379 aa, Homo sapiens
MLRFLGEKAAAKRQVLNADSVEQSFVGLKQLISCRNWRAAVDLCGRLLTAHGQGYGKSGLLTSHTTDSLQLWFVRLALLVKLGLFQNAEMEFEPVGNLDQPDLYYEYYPHVYPGRRGSMVPFSMRILHADLQQYLGNPQESLDRLHKVKTVCSKILANLEQGLAEDGGMSSVTQEGRQASIRLWRSRLGRVMYSMANCLLLMKDYVLAVEAYHSVIKYYPEQEPQLLSGIGRISLQIGDIKTAEKYFQDVEKVTQKLDGLQGKIMVLMNSAFLHLGQNNFAEAHRFFTEILRMDPRNAVANNNAAVCLLYLGKLKDSLRQLEAMVQQDPRHYLHESVLFNLTTMYELESSRSMQKKQALLEAVAGKEGDSFNTQCLKLA

SEQ ID NO: 2569 - DNA, 5857 bp, Homo sapiens
gatgatgactcaggtgatggaatggatgtagcagggcttgacattgaaaccagtttttcttcctcttctaccttggtagcattgtctgttggcagtaatccccagtcttcttctgggttagactgtggtaatgatacagatattactactaaagtattctctactgaaccgcatcattcagaacataaattgcaaactaaaactttaaacacattacatctgcagtctgagccaccggagtgttctataggaggaaacaacttggagaatagcttgtgtgccttgagccctgaattgggagcatctaattttaatgatcagaagagcagtgggatagaatatacaaaagtagtaaaaggcttgaccaaaatacattcacttcctcggtcagtatttatgaaagctacaaaagatgggcaatgtgaaagtcaagatccaagaattgagctcacactaaataagccagatttcacatcattaataggttctcaggctgccttgatcaagagtggtttgggttttgttaaaagtacttcatggcaccatagtgatttattaaggaaaggtggcgaagaaagtctgagagccaaatcagaacatgaacagaagactagccatcagttacaaaaggcaatgccattcctacaaaatagaggaccaacacccaagcctgatcttcttagagaaaataacaatcctgtagaattcaagaccactgcatcggtgttgcctaatcaagtatcagttatcacaaaacagacaagacctgaaaaggttcagagtgccaaattggaacacttgaggccacatagggttgagcctaccttagtaacagaaaatagtggcaacaaaaccggtatgtcaactgtagcaaaatgtgatggggaaagagatgatacaacacaaaacatcacggaggtggctgctgtgaaaagcatttcaccagaagtttctgcctctaggagaaaattagattttaattctccaggtggttcttcaccagtagaaaattctgattgttccacaaatagcagattatctttctctcctgaaaatatcctcatccaaaaccaagacattgtgagagaagctgcagtgcagggagatgggcagaagcaaaggcagcctcaggccacagatctggactccagtgggacacatggcagtgagatgcttccagccacagaagtgactgtgtcaggagggttttctgttgaagaaaccagctgtggagacacagggagatctggtggtgaggccctggctgttgcaaatgattctaccagcacaccacaaaatgctaatggactttggaaattgaaatctacaactcccggtggtgctttgcctgagtgttttggcaccacagacactactttttcttcagcattttgcagaaaacatggagagacacaggatacctcccaaagtagcctgcctggtaccttacattgttacacaggcattcgagaggggggagacgacactgaggtagagagtgaggcatttagctgcagtgaggggagcgaacagcaagatgctcctgatgactcacagaaaaatttaggagacacagatgctgctgtagccgaggtgagaccttccttagaggtaggttatttgacgtcagctctgcaagattttaacataagtactttttctgagctggatagactttccacatcagaggttgtgatgtttcttgagagctgtcagttaggggattatagttcaggggactctgtttctgaatgttctagtaaaggaaccctaagtaaagaaatgaacaaagaattaaaggcaagtgaaataggagaaaaatacagaaagcaaccctgtgaggaagaaacacttggaacctgtgaagagtggattgaatcagaggaagatgattattcgttaaaaaatacaagtcagctcactcagtgttctttggaaactctgtctgaggttctgaccaagattaggcaagaacttcaaacaaattctgaagattgcaatggtaaagatactggcagtttattgctcttaaatgtaaataacaacatgaccactgagaatttaaaagagaaaagtccatttcgggaaacgactggctcctcatcacatgcttcagaaccaaccccacaagcagctgccttggacactgagggcagctctcccatcagcggtatgcctcagaatgaaaaccctcagagcagaccagaggcccgttcagatgcaggcaggcaaaccgatggtggggaagaagacctgccagaacctgtggagccatcagccttgtgctctgactctgtgatggagccatccatagagcaaagttctaactgcgaggccgaaacaacatttcagtgtcagatagcaacagtgacctcagaagttataaacgtacttataaataaggatcagaatctagtcattgaaaagggggacaactggacaatcatcagtggtgtagctgtcttgccacatgtggaccaggtcacactgtgtgacattcctggagacatccctatttctcaggatcaaggagagctggaagctggttgcatcccagtgacttctgctgagaagtccccagaggccagtcacactggccctgcatttcaggaggctccatgtggcaataatctttcatgtccccaagaggatgtttcaagcagtggtcagagcaccaactttgataagagtcgtttgcgaaatagacccgttaagcctagtatatggattagttctcaaatctatgatcaaaacttcgagactcagattgttgcgtctgatcacacatattataactcaaaactagagccatctggcaaaaataagaatcgatcaaagatttcaaacaaagatcagtcaaacaaaccagtaaaaacttcagcgtcgagcagagttgaaactcatcagagtgaagttgctcagtcattttcaggggaaaaagctaatacaaaaactcaaagaagccaaactcagaccattttagcaaatgctgatacatccactcctacagattgttctcctgacacactgagtaaaatacggcaagaggtggggcctcctttgccgcctctgcttgctcctctgatagctacacctccaaggacttcacagccactgtctccactgatatcgagttctagtccttcctcaccagcctctcctgttggccaggtttctcccttccgtgaaaccccagtgcctcctgccatgtctccatggccagaggaccccagacgtgcctctcctccagatccttctccatctccatctgcagcttcagccagtgagagggtagtgccgtctcctctgcagttctgtgcggccacgccgaagcacgcacttcctgtgcctggccgactcccaccctgtgcatctggccacgctgctgtgggagggcctcaggagaattctgtgaaaatccttgacaccatgtatccagagttatctgccagggcccggaccctcaacatcctcaaagggaatattcaactcacacgaggtccgcctgctgactgtaagaatttaccgggacctgccagtgctatgataggattcaaaacgatcacttcagcagcaactgcttttgtcaaaactgggagcagctctggtggtgactgtaaccaagacaagtcaagagatttggggactcagcaggattcaagcgggaaaagaacactgtcaacgtctacactgagaagtgctaaaagactgcgcctggacactgggtccccagaaccagaaaccaggggagtcactgcagaaggaatccacaaaaacctcccagggaacctccctccagctgaagttgcaacaacaaatgaggaaagaagttgttctagtccagccgtcagtgcagtttcacagttgcctttaagcccaaaagaaactgtggagtcccatgataaagccatagctaatgccctgaagaaaattgcagagttttcttttgatctgttacctgtcattcgtagtcatgtgtatgtgggaaatatctccaaaaagcccgtaatgagagatcaagagaaggaagttgtttatgaatttagcacaacaaaaaagcatttagcagagtgcttgcttcactctattctctcagaactaaaaattcagaagatatctatggaccacaattacattcacgccctctgcagggtgtatgtgggtatttgtcggcaactcggagacttggaaagagctcgtttgttttgctacagcctacttaaagaagattttccggagtctgaaaaattaactttgtttattgcaaacatgtggcatgatatatttctctctcaatcggtgattaataaagcaatgcagttagttgccaggcaacgtgctaaaggagaggttctgaactgcttgagagcttttcttaattgggaaaagaatgccccggtagatgttggcttcatggtttctaagctgcttttgaccatacagttatgtccaaaaacagaatttcaacctagtgaaaaatttggtgaagacctaagtgataacacttgggaatacatatttgccattgatctgctctgctgccatcagaaatggatctggacgcatgataacatcataagtaaggagctgtggcctgtgatggataaatggataaaatacagaaaaggacatgcaaacattgcgtatactcctgatattattatagcctcaatactgaggctgattggtcgtttaggccaattgggtttgaaagaaggatttccatctgctgtgaaaaatattagttcggttattggtatgtttatacagcatgctcacgatgaagatataccatggggtatacagttagcagccgtgtatgctctttgtgacttgagtcccagcaatccagcagaaatttccaagatcctggaagcttggcggagagaggcctccaaaagcgttccgtctgcgattgtcagctgcctagaggaagtcagtgccctgagcacagaggagcttggctgacctgggatgccactgaggcttgagaagtgccttgacacattttgaacacaaatagtttgatcagctttcagaatacaaagggaggtttcaaaacaaaaagacataaaatagataaaacagaccagaggctctccttattgtttggcaaggagacaggagaaacaagcagtcgcatagtcgtttttccctaaatctaatacgtttcacttaaggctgttgtgatctgtgacatatgggttatattattgtgtctttgtcaaacaacaaaaacttgaacttagccctttttttgctgcagaaagtgtccttttagtggcttcttaaaattgagtggcattttataatgaacttaccaatataaaaacatgatttggttcctgagctgttgttgttggacttgtgttccaatgagtgactaggaaaaaataaattggcaaaaacctagagttttctgctatctttgctggaaatgagttgcaaaagtttttctcaagatgtagtgcgtaattgatcagagcaaaacatgcagagcccttagcagaaacccactttaatgcattttcttcatatccctaaagttccttaaaaatatgtgacaatgcatcaggaagaggagaactgaagagtagaagttcccttgcagatttttttatcagtgacatgtaatgagcaattcacagatgagcgcaggcagagctctgtgtgccgtgtacatatggaccgtgctatgatgtgtctcacattggatgatattccactttgggaattttagtatttgtatatagaaaatgggtttaataactcaccatggttttgatttgtcttatattcgttatttcttaaaactcttgtatgtgtttttataataaaaaataaaagtaagccatgg

SEQ ID NO: 2570 - protein, 1655 aa, Homo sapiens
DDDSGDGMDVAGLDIETSFSSSSTLVALSVGSNPQSSSGLDCGNDTDITTKVFSTEPHHSEHKLQTKTLNTLHLQSEPPECSIGGNNLENSLCALSPELGASNFNDQKSSGIEYTKVVKGLTKIHSLPRSVFMKATKDGQCESQDPRIELTLNKPDFTSLIGSQAALIKSGLGFVKSTSWHHSDLLRKGGEESLRAKSEHEQKTSHQLQKAMPFLQNRGPTPKPDLLRENNNPVEFKTTASVLPNQVSVITKQTRPEKVQSAKLEHLRPHRVEPTLVTENSGNKTGMSTVAKCDGERDDTTQNITEVAAVKSISPEVSASRRKLDFNSPGGSSPVENSDCSTNSRLSFSPENILIQNQDIVREAAVQGDGQKQRQPQATDLDSSGTHGSEMLPATEVTVSGGFSVEETSCGDTGRSGGEALAVANDSTSTPQNANGLWKLKSTTPGGALPECFGTTDTTFSSAFCRKHGETQDTSQSSLPGTLHCYTGIREGGDDTEVESEAFSCSEGSEQQDAPDDSQKNLGDTDAAVAEVRPSLEVGYLTSALQDFNISTFSELDRLSTSEVVMFLESCQLGDYSSGDSVSECSSKGTLSKEMNKELKASEIGEKYRKQPCEEETLGTCEEWIESEEDDYSLKNTSQLTQCSLETLSEVLTKIRQELQTNSEDCNGKDTGSLLLLNVNNNMTTENLKEKSPFRETTGSSSHASEPTPQAAALDTEGSSPISGMPQNENPQSRPEARSDAGRQTDGGEEDLPEPVEPSALCSDSVMEPSIEQSSNCEAETTFQCQIATVTSEVINVLINKDQNLVIEKGDNWTIISGVAVLPHVDQVTLCDIPGDIPISQDQGELEAGCIPVTSAEKSPEASHTGPAFQEAPCGNNLSCPQEDVSSSGQSTNFDKSRLRNRPVKPSIWISSQIYDQNFETQIVASDHTYYNSKLEPSGKNKNRSKISNKDQSNKPVKTSASSRVETHQSEVAQSFSGEKANTKTQRSQTQTILANADTSTPTDCSPDTLSKIRQEVGPPLPPLLAPLIATPPRTSQPLSPLISSSSPSSPASPVGQVSPFRETPVPPAMSPWPEDPRRASPPDPSPSPSAASASERVVPSPLQFCAATPKHALPVPGRLPPCASGHAAVGGPQENSVKILDTMYPELSARARTLNILKGNIQLTRGPPADCKNLPGPASAMIGFKTITSAATAFVKTGSSSGGDCNQDKSRDLGTQQDSSGKRTLSTSTLRSAKRLRLDTGSPEPETRGVTAEGIHKNLPGNLPPAEVATTNEERSCSSPAVSAVSQLPLSPKETVESHDKAIANALKKIAEFSFDLLPVIRSHVYVGNISKKPVMRDQEKEVVYEFSTTKKHLAECLLHSILSELKIQKISMDHNYIHALCRVYVGICRQLGDLERARLFCYSLLKEDFPESEKLTLFIANMWHDIFLSQSVINKAMQLVARQRAKGEVLNCLRAFLNWEKNAPVDVGFMVSKLLLTIQLCPKTEFQPSEKFGEDLSDNTWEYIFAIDLLCCHQKWIWTHDNIISKELWPVMDKWIKYRKGHANIAYTPDIIIASILRLIGRLGQLGLKEGFPSAVKNISSVIGMFIQHAHDEDIPWGIQLAAVYALCDLSPSNPAEISKILEAWRREASKSVPSAIVSCLEEVSALSTEELG

SEQ ID NO: 2571 - DNA, 4744 bp, Homo sapiens
aaataataaagaaattgaaaacaatacattaatataccataacactaaaaagagcaggagcgagagatgagaaagggaatccagcccgctctggagcagtacctggtgaccgccgggggtggggagggggcggctgtcgtcgccgccgccgctgcagcctccatggacaaaagggcactgctagccagccccggcttcgccgccgccgccgccgctgccgccgccccgggcgcgtacatccagatcctcaccacgaacacttccaccacctcctgttcctcctccctccaaagcggcgccgtagccgccggccccctcctccccagtgcccccggcgcggagcagaccgccggcagcctcctctacaccacgccgcacggaccctccagcagagccgggctgctgcagcagccaccagcgctgggacgcggcggcagcggcggcggcggcggccctccggcaaagcgaaggctggagctaggagaaagcggtcatcagtacctctcagatggtttaaaaacccccaagggcaaaggaagagctgcactacgaagtccagatagtccaaaaactccaaaatctccctcagaaaaaacgcggtatgatacgtctcttggtctgctcaccaagaagttcattcagctcctgagccagtcacccgatggggtattggatttgaacaaggcagcagaagtgctaaaagtgcaaaagagaaggatttatgatatcaccaacgttctggaaggcatccacctcattaagaagaagtctaaaaacaacgtccaatggatgggctgcagtctgtctgaggatgggggcatgctggcccagtgtcaaggcctgtcaaaagaagtgaccgagctcagtcaggaagagaagaaattagatgaactgatccaaagctgcaccctggacctcaaactgttaaccgaggattcagagaatcaaaggttagcttatgttacatatcaagatattcgaaaaattagtggccttaaagaccaaactgttatagttgtgaaagcccctccagaaacaagacttgaagtgcctgactcaatagagagcctacaaatacatttggcaagtacccaagggcccattgaggtttacttatgtccagaagagactgaaacacacagtccaatgaaaacaaacaaccaagaccacaatgggaatatccctaaacccgcttccaaagacttggcttcaaccaactcaggacatagcgattgctcagtttctatgggaaacctttctcctctggcctccccagccaacctcttacagcagactgaggaccaaattccttccaacctagaaggaccgtttgtgaacttactgcctcccctgctgcaagaggactatctcctgagcctcggggaggaggaaggcatcagcgatctcttcgatgcttacgatttggaaaagctcccactggtggaagacttcatgtgtagttgattatgcttcgtgtgaactctccttaaaaaccgatatttttttatcatggaccagaacatctgtcatgcagtgttgtcccttcctaccttcttcctccaagagagtatcatgaagtaaactacaaacttcagaagaaagctgacattttaatgaattttttaaaaaattaataaacaaattgtctaaacgcacagttgcaggctcccttgggaaagccctgctttgctccaggctccaagatctcctggctaagtcagcaagtgagaaaatgtgcaatcaggtgtctctcaccccgaattgtccttcctccttcctccccggattggcttgctgtgcctgacggatgggctgtagaatggggtctggccacctggcctgctgggaaacagcaatcttccttaatagcatttcaagccgtgccttctccgcagaatgcatgtctttgaggtctgctaatatggaatggaactgcagcaaatgcaaacttgaagtcatgcaaaagtatgaaatggatttcttcagctcttcttaggaatatttaaattactgtcataattcagtttaagctatgaactgtgtgtcccagtaggaggtcaagaaaacctccacagccttctggatgaagaacctgttttcaaatatacttgttgcagatacagaagactagtagagttctgccactctaagctgttgtggattttcctgtctccatgaaccactcccattcccccgtccccaatgtgtttgtgagtttccagttgatttgtagcaaatgcctacttagttctttgtggattgttctagacttttaatttttttagctgccatttaagcattcctgtggcacccatcaccatttcaatttaattgtttactttgaagcggtttttgcaaattcatattacttaagcagagggagagaacctctactgatcagagcatctaaacctgtgtgatctaaggtttatcagcctctgcaaggagctttgtcccatcgtgcttccattcccaggagggggagcttggagcgagtcagtcctggggcttgctgacatgggtggcccattggaaaggagaaccaggtcagatgatgtaacagccccaaggagcagcaggcatgggtccctccatccttgggcttcccgggcccctgtgacaggggaaagggctctcttacaccgcactcagggagaccacttctcaggatggggtcagatggagagacctctagggagaaagacatccccattgtgtgagtggcatttccttaagctggcaggaacagggagcagccctgtgtcgggggctggaatagttctggccagaccccgttccccttcctctatgaaggaataagttggaccaagggaagtcggggacgtaaaaaatgaagcaaaacaatgccagggtgtctcccgctttactcttcaggaatggtgtcccaagttggaggctttgtgtcagctgcaaatcctaccagttatgtccaagaatggctttccctcgggcaggtggcagcggccatctcccactgggaatatggcgtagtatctccggtccattccttggatgctaaggactgcgggaatgagggagtcagataaagaacaaacctcgaaacgaacagttaaattgaaatgctatgtgcctgacccaatggtaggcacatagtaggcactcaactcatatgtttaattgaattgaaaatatcccttaggaaaaaaaaaaaacacacaaaaaaccacaagagccccagccagtttactccaggtagatttccacaatatgcaaagtggtggtggggtcaagacagatgacaccagcactttaaactctttgtgtgggtatgcgtgggtgtatgtttgggaagaaaaacaaaggtgcagactatcttcctttttttcttcttcagcctccatccctggcctcctcccctcacacacactggacttggtacaaaatgtcggtgtggtcctagatgaagcattggggtgggggagggagagggagctttgtgttaagtgcctactggaaatgcactgtggggttttttcctgtatgggaaaccatttatgccaagcttttccccatttcccatatttatctcatctggttagctgcctctgcttccagctttgtgtaattctctttgccagctgcacaaagctgattttttccaaagtctaaagactgagctcacctggctagattgttgtgtgttttgttgaattttttcataatgtaatgccgtatttattgtttttaaaatgaaaggaatactaataagtcttaaaagttccttcatgcataagatttttttccagttactgggcttaactggtgtacattaattagatgtccatactgtattttgtttgcattaagtaattttctttttgacttagtatccggcacacaaagtgggttagtactacagtatttgcgttactttaagtactaagtatgcaggtttcctggtaccattgagttgctgctattaaagctcacacacgaaatggctaaaagttacaagtgtgcaaattatgactgcgtgagccttagaaaataaaatgtataaagggcaacacatgagctgtcaaacagtgttaggagtgtgtttatatgtacagagttgtgcatagcaatcgttttatttaagttgatatgtagtctactcacattttcattatttagcaattttgtacaaaaatagcaattaatttgtaaacactgccagaatactttctagctgctttgtaattttttaagagtgttattttgtttttgtttttctgttctttgttgtggctcttgttttcatttttgttgtacgtgtagatctgtaaataaaattgcagtatttaaagcttaagctttcaggaaaaagaaaataagaattcagtgtgtgcatgacaactcgtgtgtatgagaaggagggatatgaaggaagatggcttgcagagtaagtcgggtggcaattgtcagggtgtgggaatttcttttcctacggggtacgtgattttgtaaaaaggaagtatttctcccaaaattgggagtaggcaaactactaatcagtttagctttgtgttgtatgctagtttaaaaaagaaaatatgtaatataatgtaaaaaaaaacaaaaaaaagcttttatgatggattttgtaaatagatttgttacagggtgacctgttctctagctgtgatcttaccacttcaaatgggtgtaatttgaataaattttgtatggtaaaggatcaataaaatgattttttttaaga

SEQ ID NO: 2572 - protein, 465 aa, Homo sapiens
MRKGIQPALEQYLVTAGGGEGAAVVAAAAAASMDKRALLASPGFAAAAAAAAAPGAYIQILTTNTSTTSCSSSLQSGAVAAGPLLPSAPGAEQTAGSLLYTTPHGPSSRAGLLQQPPALGRGGSGGGGGPPAKRRLELGESGHQYLSDGLKTPKGKGRAALRSPDSPKTPKSPSEKTRYDTSLGLLTKKFIQLLSQSPDGVLDLNKAAEVLKVQKRRIYDITNVLEGIHLIKKKSKNNVQWMGCSLSEDGGMLAQCQGLSKEVTELSQEEKKLDELIQSCTLDLKLLTEDSENQRLAYVTYQDIRKISGLKDQTVIVVKAPPETRLEVPDSIESLQIHLASTQGPIEVYLCPEETETHSPMKTNNQDHNGNIPKPASKDLASTNSGHSDCSVSMGNLSPLASPANLLQQTEDQIPSNLEGPFVNLLPPLLQEDYLLSLGEEEGISDLFDAYDLEKLPLVEDFMCS

SEQ ID NO: 2573 - DNA, 7071 bp, Homo sapiens
gccgcctcctcggccagtggcgtagccgaatcggtgtcgcggccagccagataggggcggaggtccggaacccagtctggacccgagcggggggccatggagaaagcggcccgaggcgctgtttacaccgactagcgcgggcccgttgcggctgcaggcaccatggaccgagcccccacggagcagaatgtcaagctgtcagctgaggtggagccatttattccccagaagaagagtcctgatacatttatgatccctatggctctcccaaatgataatggaagtgtttctggtgtggaaccaactccaattcccagctacctgattacttgttacccatttgtgcaggaaaaccagtccaatagacagtttcctttatataacaatgatatacgatggcaacaacccaatccaaaccctactggaccatactttgcctatcccattatatctgctcagccgcctgtttctacagagtatacatattatcagctgatgccagcaccatgtgcccaggttatgggtttctatcatccttttcctacaccttactccaacacctttcaggctgcaaatactgtaaatgctatcaccacagaatgcactgagcgtccaagtcagcttggacaggtcttcccattgtccagccatcgaagcagaaacagtaacagaggatcagtggtcccaaaacaacagcttttacaacagcacataaaaagcaaaaggccgctggtgaaaaatgtagctactcagaaagaaacaaatgcagcaggtcctgatagtcgatcaaaaattgtgcttctggtagatgcttcacagcaaactgatttcccatcagatatcgctaacaagtctctctcagagaccactgcaacaatgctctggaagtccaagggcaggagaagaagagcatcccaccctactgctgaatcttctagtgagcagggggctagtgaagccgacattgacagtgatagtggttactgcagtcccaaacacagcaacaaccagcctgcagcaggggctttgagaaatcctgattctgggaccatgaatcatgtggaatcatctatgtgtgcaggtggtgtaaattggtccaatgtaacttgccaggcaactcagaaaaaaccttggatggaaaaaaatcagacattttctagaggtggaaggcaaactgaacaaagaaataattcacaggttggattcagatgccgaggacacagtacttcctcagaaagaagacagaatttgcaaaagagaccagataataagcatttaagctctagtcaatcccatagaagcgatccaaattctgagtctttatattttgaggatgaagatgggtttcaagaactaaatgagaatggaaatgctaaggatgagaatattcaacaaaaactttcttctaaagtattggatgatttacctgaaaactcaccaatcaatatagttcagactccaattcctattaccacctcagttcccaaacgtgcaaaaagtcagaagaagaaagctttagcagcagcccttgccacagctcaagagtattcagaaataagtatggagcaaaaaaaattacaggaagctttatcaaaagcagctggaaaaaagaataaaacacctgtgcagctagatttaggggacatgttagctgctctggaaaaacaacagcaagcaatgaaagcacggcaaattactaacaccagacctctgtcatatacagtggttactgcagcttcttttcacactaaagactctactaatagaaaacctttaaccaaaagtcagccctgtttgacatcctttaattctgtggacattgcttcttctaaagcaaaaaaaggaaaagagaaggaaattgcaaaactaaaacgacccacagcacttaaaaaggttattttaaaagaaagagaggaaaagaaggggcgcttaactgtggaccacaatcttttgggatccgaggaaccaacagaaatgcacttagattttattgatgacttgccacaggagattgtttcccaggaagatactggactaagcatgcccagtgatacttcactctctccagcaagtcagaactctccatactgtatgacacctgtgtcacaaggctctcctgctagttctggaataggcagtccaatggcatcttcaacaataaccaaaatccacagcaaaagatttagagagtattgtaatcaggttctttgtaaagagattgatgaatgtgtgactcttcttctccaagagcttgtcagtttccaggaacgcatctaccaaaaagatcctgtaagagcaaaagcaaggagacgactcgttatgggtctaagagaagttaccaaacatatgaagttaaacaagatcaagtgtgttataatttctccaaactgtgaaaaaatccagtcaaaaggtggtctggatgaggctctctataatgttatagccatggcacgggaacaagaaattccttttgtgtttgcccttggaaggaaagctctaggacgctgtgtgaacaagctggttcctgttagcgtagtgggaatcttcaactactttggtgctgagagcctgtttaataaattagtagaactcactgaggaggccaggaaagcatataaagatatggttgcagcaatggaacaggagcaggctgaggaagccttaaagaatgtgaagaaggtaccacaccacatgggacattctcggaatccctctgcagcaagtgccatttctttctgcagtgttatttctgaaccgatctctgaagtaaatgaaaaggaatatgaaacaaattggagaaacatggtggaaacttcagatggactggaagcatcagaaaatgagaaagaggtatcctgtaagcacagcacttctgaaaaacccagtaaacttccatttgacacacccccaattggtaagcagccatcattagtggctacaggcagtactacctcagctacaagtgctgggaaatccacagcaagtgataaagaggaagtgaagccagatgacctggaatgggcctcacagcagagtacagagactggctctttggatggcagttgccgagatcttttgaattcctccatcaccagcaccaccagcactcttgtacctggcatgcttgaagaagaagaagatgaagatgaggaggaggaggaagattatactcatgaacccatatctgtagaagtgcagctcaatagtagaattgagtcttgggtctcagagacccagagaactatggaaacccttcagcttggaaaaacccttaatggttctgaggaagacaatgtagagcaaagtggagaagaggaagcagaggcgcctgaggtgctggagccagggatggacagtgaggcatggactgctgaccagcaggccagtcctgggcagcagaagtccagcaactgcagctcgctcaacaaagagcactctgattctaattacacaacgcaaactacgtaactcaggaaatgtcggctctctatctccagctgtggaagggttgcagccattaccttttatgcttcatctcaacattttgcactgtccagtatttaatatacgtatttaattcccaacaaatatttttgtagcttttacttgttatgatctgtagcttagcttttaattagtatctaagtgtctttctaagaactgtgtggaaaattcagatctgtttcagcttattttgtaatcaaaaacagtgataaaaagaagaccagatcttaaagaaaataaatttcaaatgcttacttaaaagacattttgaaagttaaagaacaaggttctaaggatagaagcagttatcagtgtttgcttcaggactccacctcctctactctaatttgaccaaaaaattgtttgggcttctttaaaaaagaactgggggtggagtcagaaaattaaatgaaaggctgagggtaactaagtccaccagtgttgtatgttaaaaaatcaatgcaacttttatgtggtccacaaatgtttagtcagaagtcactgattattgtaattaattagtgttgggatgggctaaaacagagccttcaaaacttcggctagcagtggagccaccatcttagattatagctagctagcctcatttgtggaaagtgatagatgctgtctataatagtgaacagtcacccatgataggacctccaggttctgtctcatatttgcttcttacttacctcaggaatgctcttgtacatagacttatttacaaaaagctaggcacatgttgacaggtgaataactgtaaccgattgtatgactgctgcacttacatgtaaactcttcagaaacagagtcttatactggtgtgttctcttgcatgcttctggttcaggactcttgatttgagatatggatttgattgagtatccaaacttgtcctgagtgcaaaactgtttcaccttttaaaaaatacctattttgcacctagccttgagcaccttccacatagcaatgaccatagttactgtcaggaggtcaaggaaaggaactttgcacaacttgtgacatgtatcctgataatcaaggcttagaggaggaagttttagaagataagagaaagttgttctaattgtgctgaaactattagatgatttagagtatacagatatgtaggtattaattctctattcactattatttatctctgcccttctctaggagtttgtatacctgcttaggagacaataaatgagctaaatgttttatttgctagtcagtcaccacctggacttcagtgactttacaagtttatgtaatggtggaagaatgacaaactatgtaatttttttgtcttccatccaactccccaccacccccaactgtcccccccacccccctcacacacatgcacacatccgtacgtgtgtgtgttttccacttacaagcttccataagcaggcacaaaactgagaaggaaggggtattatccctgccctgattatctggggcagggctttgcctcacagaggcaggagagaagaattgggcagattctttactgaactcattgggactactgtgctagttttgatgttttataatgctggcatttaattactggagagattggattcttggttgatgatttagtatttgtgaattgtgaaagttcaggagctgtgtagaaaatgttagtcaatcaactttattattgtgctaaaaggggacattcttatactgtcctgtctaaactgttctccagtatagacttcctaggcactaaatatccaatatttaaaggaacacagcaggtaaggaatgaagcctctgaaatagtactcatggatttatacatggcagatcttactgtctctacacatttggaagtgttcgttggtttaaagaaatgatagaggttttgaactactgacagtcttaaaagtgaatttaaaaactgttcatactttttatggtgtaaatttcctttgctcgatgtcagtgattcagataactcttgaccttgagatgatggcttttcacaggtttcttatattttatatctcttctgaacatgaattgtcattttagatttttgacatttgtatcaaaagagaagttgaggaaatcttcagaacactggtaacttttagttttgctatagacttcagaagtgtttatttatatgttcggtaaatgctctcgcatatgcagtacctcttctgccagcaaatccaagggaccatagcctttttatgagacaggtcacctctagaggacaccccaagaattattaaaggaaatgttaccattttgagagcatgcttaaataaatattaataatgtctttataacttgtttcctttaaattttggaatattgaattacaggctttggaggagttgtgaaaattaggaaagtttttatatattttttgaagtgggcatggttggctctttgaagacctataaagagatccagtgggaagagtaagggttggttcatcatcacaagaaataaaaaacatagtgattttttctcttaatgtgtagaggtggttttactggcaataattaataatagatttctatttcagtatgtaagcatattaactaaaatatgaattacacttccaaagttagatttctgcttcagtaggtttgtttgctgtgaagattacttctcaaaagacagatgttcatattagcttaattttcggtttaaatatgtttgtaaatgatgtaatatatttcttttgactaaatgtggaaaagtaatgtgtgttatacattgagaagtttttactggctttgactggaggttgtttttgcagagatggtattttatatgattccagtatttggaaaagaattagtcaaaaggaattcacatagtttaaatactgagaaattaatatccaaatatgtacttgtctgatttctaaataagctgggggaggagggaggggtgggaattgaaatgtgcaaatgagtagtgaatgctacactcattttcaactctttaacatgaaactgttcaatcttaacacattgttactttaatatatgtataaagaagtattactgtttgtaaagctgctgtttgcttaaaaaaaaaaaacacccttgtcatgtattttctgtatgttgggccaacaggttagaacatcaactcatttaaaaatttttatctttttttgatttaaaaaaattctgtgaaataatttatttacagacatcttcctcctccctcatcccttccaacctttacatacatcacagaatcaaccaaactgtttgcctaatctgaaatctgaatcctaatgagaaaaatttaaattttgttggcacatcacaccttgaaagtatttgtattattttataatttaatttctaaatataccacataagtttataatttaatgtcttaattgtaatgctctaataaaaaactagcaaaattagtgtgagttataacatgaagggattttcatcttttgctgtatgaaggataattgttatatcacatttggggggtaataacagcttttttgcactatgtaaatactagtggggattcttctgtactaataaaatgattattgaaatg

SEQ ID NO: 2574 - protein, 1110 aa, Homo sapiens
RGPVAAAGTMDRAPTEQNVKLSAEVEPFIPQKKSPDTFMIPMALPNDNGSVSGVEPTPIPSYLITCYPFVQENQSNRQFPLYNNDIRWQQPNPNPTGPYFAYPIISAQPPVSTEYTYYQLMPAPCAQVMGFYHPFPTPYSNTFQAANTVNAITTECTERPSQLGQVFPLSSHRSRNSNRGSVVPKQQLLQQHIKSKRPLVKNVATQKETNAAGPDSRSKIVLLVDASQQTDFPSDIANKSLSETTATMLWKSKGRRRRASHPTAESSSEQGASEADIDSDSGYCSPKHSNNQPAAGALRNPDSGTMNHVESSMCAGGVNWSNVTCQATQKKPWMEKNQTFSRGGRQTEQRNNSQVGFRCRGHSTSSERRQNLQKRPDNKHLSSSQSHRSDPNSESLYFEDEDGFQELNENGNAKDENIQQKLSSKVLDDLPENSPINIVQTPIPITTSVPKRAKSQKKKALAAALATAQEYSEISMEQKKLQEALSKAAGKKNKTPVQLDLGDMLAALEKQQQAMKARQITNTRPLSYTVVTAASFHTKDSTNRKPLTKSQPCLTSFNSVDIASSKAKKGKEKEIAKLKRPTALKKVILKEREEKKGRLTVDHNLLGSEEPTEMHLDFIDDLPQEIVSQEDTGLSMPSDTSLSPASQNSPYCMTPVSQGSPASSGIGSPMASSTITKIHSKRFREYCNQVLCKEIDECVTLLLQELVSFQERIYQKDPVRAKARRRLVMGLREVTKHMKLNKIKCVIISPNCEKIQSKGGLDEALYNVIAMAREQEIPFVFALGRKALGRCVNKLVPVSVVGIFNYFGAESLFNKLVELTEEARKAYKDMVAAMEQEQAEEALKNVKKVPHHMGHSRNPSAASAISFCSVISEPISEVNEKEYETNWRNMVETSDGLEASENEKEVSCKHSTSEKPSKLPFDTPPIGKQPSLVATGSTTSATSAGKSTASDKEEVKPDDLEWASQQSTETGSLDGSCRDLLNSSITSTTSTLVPGMLEEEEDEDEEEEEDYTHEPISVEVQLNSRIESWVSETQRTMETLQLGKTLNGSEEDNVEQSGEEEAEAPEVLEPGMDSEAWTADQQASPGQQKSSNCSSLNKEHSDSNYTTQTT

SEQ ID NO: 2575 - DNA, 2110 bp, Homo sapiens
aacatggcggcggaaagtggtagcgattttcagcagagacgtagaaggcgccgggacccggaggaaccggaaaaaacagaactcagcgaaagagagctggcagtagcagtggcggtgtcccaggagaacgatgaggagaacgaagagcgctgggttggacctttacctgtggaggcaacactggccaagaagaggaaagtcttagagtttgaaagagtctatcttgataatctccccagtgcatccatgtatgagcgcagttacatgcatagagatgttatcacccatgtggtatgcaccaaaacagattttattattactgccagtcatgatggacatgtcaagttctggaaaaaaatagaagagggaattgaatttgttaaacattttcgtagtcacctgggagttattgagagtattgcagttagctctgagggagcattgttctgttctgtgggtgatgataaagcaatgaaggtgtttgatgtagtgaactttgacatgatcaacatgctgaaacttggctattttcctggacagtgtgagtggatctattgcccaggggatgcaatttcttcagttgctgcttccgaaaagagtacaggaaaaattttcatttatgatggccgaggagataaccagccacttcatatttttgacaaactccatacatcacctcttactcagatacggctaaacccagtttacaaagcagtagtgtcttctgacaaatctgggatgattgaatactggactgggcctcctcatgaatataaattccccaaaaatgtgaactgggaatataaaactgacactgatttatatgaatttgccaagtgtaaggcttatccaaccagcgtatgtttttcaccagatgggaagaaaatagctactattggttctgatagaaaagttagaattttcagatttgtaactggaaaactcatgagagtctttgatgaatcactaagcatgtttactgaactgcaacagatgaggcaacagttaccagacatggaatttggccgacgaatggctgtagaacgtgagttggagaaggttgatgctgtaagattaattaatatagtttttgatgaaactggacacttcgtgctgtatggaacaatgctgggcattaaagttataaatgtagagacaaaccggtgtgtgcggattttaggcaaacaagaaaatattagagtgatgcaattggctttgttccaggggatagccaaaaagcatcgtgctgcaactactatagaaatgaaagcttctgaaaatcctgttcttcagaatattcaagctgacccaacaatagtctgtacatcattcaaaaagaatagattttatatgtttaccaaacgagaaccagaagatacgaaaagtgcagattctgatcgagatgtttttaatgagaaaccttctaaagaagaagtcatggcagctactcaagctgaaggacctaaacgagtttcggacagtgccattatccacaccagcatgggagacattcacaccaaactttttcctgttgagtgccctaagacagtggaaaacttctgtgttcacagcagaaatggttattataatgggcatacatttcaccgtataattaagggctttatgattcagactggagatccaacaggtactggtatgggaggagaaagcatatggggaggagaatttgaagatgaatttcattcaacattacgacatgacaggccgtacacactcagcatggctaacgcgggatcaaatactaatggatcccagtttttcataacggtagtaccaacgccttggcttgataataagcatacagtatttggacgagtgactaaaggaatggaagttgtacagaggatctccaacgtcaaagtcaatcccaaaacagataagccctatgaggatgtcagcatcataaatattactgtcaagtaaaataagatttgttttaatgtacttgcaaataaaaatacaatattaaacagattattttacattaggaagcttaggacttgctgaatatacagatcatgtttcaaagatacagtatttttgtattttttattaaaggctattttttaaaaaaaaaaaaaaaaaaaaa

SEQ ID NO: 2576 - protein, 646 aa, Homo sapiens
MAAESGSDFQQRRRRRRDPEEPEKTELSERELAVAVAVSQENDEENEERWVGPLPVEATLAKKRKVLEFERVYLDNLPSASMYERSYMHRDVITHVVCTKTDFIITASHDGHVKFWKKIEEGIEFVKHFRSHLGVIESIAVSSEGALFCSVGDDKAMKVFDVVNFDMINMLKLGYFPGQCEWIYCPGDAISSVAASEKSTGKIFIYDGRGDNQPLHIFDKLHTSPLTQIRLNPVYKAVVSSDKSGMIEYWTGPPHEYKFPKNVNWEYKTDTDLYEFAKCKAYPTSVCFSPDGKKIATIGSDRKVRIFRFVTGKLMRVFDESLSMFTELQQMRQQLPDMEFGRRMAVERELEKVDAVRLINIVFDETGHFVLYGTMLGIKVINVETNRCVRILGKQENIRVMQLALFQGIAKKHRAATTIEMKASENPVLQNIQADPTIVCTSFKKNRFYMFTKREPEDTKSADSDRDVFNEKPSKEEVMAATQAEGPKRVSDSAIIHTSMGDIHTKLFPVECPKTVENFCVHSRNGYYNGHTFHRIIKGFMIQTGDPTGTGMGGESIWGGEFEDEFHSTLRHDRPYTLSMANAGSNTNGSQFFITVVPTPWLDNKHTVFGRVTKGMEVVQRISNVKVNPKTDKPYEDVSIINITVK

SEQ ID NO: 2577 - DNA, 4873 bp, Homo sapiens
aagaggaatcggctttcagccttctggagaggggaagacctcgcccctcaacttcctcgtgcctagacagtggaacggggtggagcccctccgctcctatctccagcagacagaaagagccctccacctcagaaagatccagtttgggggggaggggaactcccccaagggggaagagacaactcctggttgggagaggctcctcccctcctcccccgggtaacaagcagggtgtggggggtgtgccaccttccccaagtaggacctccttctcctccccctccccctcctccaaccttgactcctcatcctcaggggacccagttcccctcaccaacttgggaggctcagcctcgtccaggaagagccactgaggatgagagccgtcacctgcctctgaagaggggaatccctccaaccccaaactccagtaccaggtggttccctccctttgccggaggaaccttggagacagaacccagaagtaccatggcttctgacctagagagtagcctcacctccatagactggctcccccagctgaccctccgagctaccattgagaagcttggaagtgcctcccaggctgggcctcccgggagcagccgcaagtgttcaccagggtcacccacagatcctaatgccaccctgagcaaagacgaggcagcagtgcaccaggacggcaagccacgatacagctatgccactctcatcacctatgccatcaactcctctccagccaagaagatgaccctcagcgagatttaccgctggatctgtgataacttcccctattacaagaatgctggcattggttggaagaattcaatacggcacaacctttctctcaacaagtgtttccggaaggtgcccagacctcgggatgaccctgggaagggttcctattggacaattgacacctgccctgacatttcccgaaagagaagacaccctccagatgatgatctgtcccaagactcaccagaacaggaggcaagcaagagcccacggggaggcgttgcagggagtggagaagcctcactgcctcctgaggggaatccgcagatgtcacttcagagccccacatctatagccagctacagccagggcacaggatctgtggatggtggagcagtggcagcaggggcttcaggccgagaaagtgctgagggtccccctcccctctataacaccaaccatgactttaaattctcctactcagagatcaactttcaggatctaagctggtccttccgcaacctctataagtccatgctggagaagtcctcttcctcctctcagcacggcttttcttctctcctgggggacatcccaccctcgaacaactactacatgtatcagcagcagcagccaccgccacctcaacagcagcagcagcagcagcagccgccacagccacctccccagcagtcccagccacagcagcagcaggcacctgcccagggcccctcagctgtagggggtgctcctccactgcacaccccaagcacagatggttgtaccccaccagggggaaagcaagctggggcggaaggctatgggcctccccctgtaatggccatgcatccacccccgctgcagcatggaggctaccaccctcatcagcaccatccccactcccaccctgcccagcagccaccacctccacagccacaggcacaaggccaggctcccatcaacaacactggctttgcctttccttctgactggtgctctaatattgactctttaaaggaaagcttcaagatggtgaatcggctcaattggtccagcattgagcagtcacaattctcagaactgatggagagtctacgacaggcagagcagaagaactggaccctcgaccagcatcacattgccaatctgtgtgactccctcaaccacttccttactcagactggtcacgtgccccctcaagggggtacccaccgcccaccagcccctgcccgtattgctgactcctgtgccctcaccagtggcaaacaggagtcagccatgagccaagtgaactcttatgggcacccacaagctccccacctctaccctggcccatcaccaatgtacccaatccccacccaggactcagcaggatacaatcgcccagcacaccatatggtccctcggccatcagtgccacctcctggtgccaatgaggagatccctgatgacttcgactgggacttgatcacttagtgcatcacagagtgtggacatcagcccagggccgcgtggtgaaatctggcagtggggaaagagcaaccccagcccgtcccttccccccgtctgtatatagacatatatcctctttttgttctttctctgtcagagaagccactgcaagatgctgccgaagataaccctctctttcctgcctcattcttctctcttccttcctgttttttcctagttcttttattattattcttatattattattattattattggttatatactgtccatagtctcctgtccctacatcatggatcatgtccaccttttgctaatttaaaatcatcaggctggaagatgaagccatgatagctacagagaaaggttttagactccagtttacctttctcttggagaaactcaatgctaatcccaccttttggccctaaattgttttttgttcccatcagtttcaggccaggactggagaggccacattaccaagtagaaagggtctgaaacattacttggcagccaagaatttggaggttttaaaatggtgctaattctgtcctctgaggtcttccttgtccctttataccttcaatccttacttctgccagtctgtatttcctatcaagggtgaaagtgatgatggtggtgcaggagggtgacaataaaatcctagtggaattggagaccattggaagggatggaatataagtcagtgtgaaactgagtatacactgccatgttacatcagtgtccattggcttgttttgagcctgttctctaagaagataggattggttttagcccaaactctgcttctatggtagggcatgaggacaactattcagcatggttttagcttcttggagatgattccaacttaactattttggctttttaaacataattttctctgaaaattaattgtggctcttatttgcatttacgaatgatcttcccatccctttttcccattctgcaaatattagtttgtcctcctttaattgtttgcccaaatcttccacccatcttttttcttccctcattttctgggattctcaaaaaagaaaaagtaacccattatcactctgagtttcgtcgtgccctgagacatgatgggaatctcattcccacctctcatagcagagccaaacctttagtgttggtggtaggaggatggggagaggaaaaaagagcttggcaaagaaatggatagggaatattttagttctttaaatatataggcagatgcttctcttggaatccagatcatctggctgaagcttttgcaagtaggctttgaggggtgaaggagattggtggaggagagtaaataatctagaggcaagagttcagtgagggccaagggggacccccagaaaaaggtatggagctaactcatctcttttacaaggggtggccatgacttactgttgcaaagtactcagtgtatatttaatgttgattgttgaattttagttacgagagggaagaacaattttacttctgtccttatttcacttgctgaaaagctgtgggacaaaatgtatggaatagacaaggccactttctttgtgatttctgcttttcatgcatattattttatttacccataatttccaagaggtttggcgttccgctctcctgcttttttctttcatccacccctttcctttttttggaagggggttatatatgagagttcattgaagaagtgccagtgaggctgaagtaaaggggcaagatagggcagttaactaaagagcactttatttctttgaagcctttctaagaaagaaatgggggtgcgagtggcttgaatctcccatgatgttggagggcacttagtggggttgaagtatgacataatatttcccattggggaaaggagaatttctcttagagggtggcaaaatgcctttgcccagtgtccctattttaggcatcttttccttccttattccttccagtcagggtgtgtcctacacaaaacttcccatcagttctcctcaatattccccatttgtaaatgatcacttctcttttctaaacccttttcctgttcagatccatacaggatttgcaagggtaggatcatacatgcaaatgccccttgttcatctgtgtcttctgcaaactagtctcatgaagaattctggcgtgcagccagggtagctgaagtttgggtctgggactggagattggccattaggcctcctgagattccagctcccttccaccaagcccagtcttgctacgtggcacagggcaaacctgactccctttgggcctcagtttcccctccccttcatgaaatgaaaagaatactactttttcttgttggtctagcattgctggacacaaagtgtagtcattattgttgtattgggtgatgtgtgcaaaactgcagaagctcactgcctataagaggaaataagagagaaagtggaggagagggacaaaaggagtaattatttggtatagatccacccatcccaacctttctctcctcagtccctgctcctcatgtttctggtttggtgagtcctttgtgccaccacccataatgctttgcattgctgcatcctgggaagggggtatatggtctcacaagttgttgtcattgtttttttgcatgctttcttaataaaaaaaaaaaaaaaaaaaa

SEQ ID NO: 2578 - protein, 574 aa, Homo sapiens
MASDLESSLTSIDWLPQLTLRATIEKLGSASQAGPPGSSRKCSPGSPTDPNATLSKDEAAVHQDGKPRYSYATLITYAINSSPAKKMTLSEIYRWICDNFPYYKNAGIGWKNSIRHNLSLNKCFRKVPRPRDDPGKGSYWTIDTCPDISRKRRHPPDDDLSQDSPEQEASKSPRGGVAGSGEASLPPEGNPQMSLQSPTSIASYSQGTGSVDGGAVAAGASGRESAEGPPPLYNTNHDFKFSYSEINFQDLSWSFRNLYKSMLEKSSSSSQHGFSSLLGDIPPSNNYYMYQQQQPPPPQQQQQQQQPPQPPPQQSQPQQQQAPAQGPSAVGGAPPLHTPSTDGCTPPGGKQAGAEGYGPPPVMAMHPPPLQHGGYHPHQHHPHSHPAQQPPPPQPQAQGQAPINNTGFAFPSDWCSNIDSLKESFKMVNRLNWSSIEQSQFSELMESLRQAEQKNWTLDQHHIANLCDSLNHFLTQTGHVPPQGGTHRPPAPARIADSCALTSGKQESAMSQVNSYGHPQAPHLYPGPSPMYPIPTQDSAGYNRPAHHMVPRPSVPPPGANEEIPDDFDWDLIT

SEQ ID NO: 2579 - DNA, 5112 bp, Homo sapiens
gtagctggggtgaggccgtcgtcgccgcacgggctggttggggctgtgtctgtgggaggcgccggggtgatggcggtggagactctgtccccggactgggagtttgaccgcgttgacgacggctcgcagaaaattcatgccgaagtccaacttaagaattatgggaaatttcttgaggagtatacctctcaactgagaagaattgaggacgctctggatgactcaattggagatgtttgggatttcaatcttgatcctatagcattaaagcttttgccttatgaacagtcctctcttttggaactcataaagactgaaaacaaggtcttaaacaaagtcatcactgtttatgctgcactttgttgtgaaatcaagaaattaaaatatgaggctgaaactaaattttacaatggtctcttgttttatggagaaggagctacagatgccagcatggtggaaggtgattgccaaattcaaatggggagatttatttcattcttacaggaactgtcttgctttgttacgaggtgctatgaagtggtgatgaacgtagtccaccagttggctgccctctatatcagtaacaagattgcacccaaaattatagagacaactggagttcattttcagactatgtatgagcacttgggagaactgctaacagttttgctcaccctggatgaaattattgataatcatatcacactgaaagaccactggactatgtacaaaaggttactgaaatctgtccatcacaatccttcaaaatttggaattcaggaagaaaaattaaagccatttgaaaagttcttgctgaagctagaagggcaattactggatggaatgatattccaggcctgtatagaacaacaatttgattctctcaatggaggagtatctgtgtcaaaaaatagtacttttgctgaggaatttgcacatagtattcggtcaatttttgcaaatgtagaagccaaacttggagaaccttctgaaattgaccagagagacaagtatgttggaatttgtggactctttgtattgcactttcagatttttcgaactattgataaaaagttttataagtctttattggacatttgtaagaaggtaccagccatcactctaactgctaatattatttggtttcctgataattttctgatccagaaaataccagcagctgccaaactgctagacagaaaaagtcttcaagccattaaaatacacagggatacttttctacaacagaaagctcaatcacttaccaaagatgtacagtcttactacgtctttgtgagctcatggatgatgaaaatggaatctattttgtctaaagagcagagaatggataaatttgctgaagatctcaccaatagatgtaatgtttttatacagggcttcttgtatgcatatagtattagtaccattattaaaaccacaatgaatctctacatgtccatgcaaaagccaatgaccaaaacctcagttaaggcattgtgcaggcttgttgaacttctcaaggcaatagagcatatgttctacaggagaagcatggttgtggctgattcagtttcacatataacacagcaccttcaacatcaggctcttcattctatttctgtggccaagaaaagagtgatttctgacaaaaaatacagcgaacagcgtcttgatgtgctctctgctctagttttggctgaaaacactctaaatggaccaagcacaaagcaacggcgacttattgtttctttggcactaagtgttggcacacaaatgaaaacatttaaagatgaagaactctttccacttcaagtagtcatgaaaaaactggatcttattagtgaacttagagaacgagtccaaacacaatgtgactgttgttttttatactggcatcgagctgtcttcccaatttatttagatgatgtatatgaaaatgctgttgatgcagccagattacattacatgttcagtgctttgcgcgactgtgtacctgctatgatgcatgcaaggcatttagagtcctatgagatacttctggattgctatgacaaggaaattatggaaattttaaatgagcatttgctggacaaattatgcaaagaaatagagaaagatctgcgactttctgtgcatactcatttaaagctggatgaccgaaaccctttcaaagttggcatgaaagacctggctctttttttctctctgaatccaattcggtttttcaatcgtttcattgacattcgggcttacgtaactcactacctagacaagactttctacaatctaacaactgtagcccttcatgactgggccacttatagtgagatgagaaacttagctactcagcgttatggactggttatgacagaggcacatcttcccagtcagactttggaacagggccttgatgttttagaaattatgagaaacattcatatatttgtgtcccgatacctctataatctcaacaatcagatttttattgaacgaacaagcaataacaagcatttgaatactattaatattcggcatattgctaattcaattcgaacacatggcacgggaattatgaatacaactgttaatttcacctaccagtttttgaaaaagaagttctatatatttagccaatttatgtatgatgaacacatcaaatccagattgattaaagatattcgatttttcagggaaattaaggaccaaaatgatcataagtatccttttgatagagcagaaaaattcaatcgaggcatcagaaaacttggaataacacctgagggacagagctaccttgatcaattcaggcaactcatcagccagattggtaatgctatgggctatgtacgaatgataagatctggtggtcttcattgtagcagcaatgccattagatttgttcctgatcttgaagatattgtaaattttgaagaactagtaaaagaagaaggtcttgcagaagaaacattaaaagcagcaaggcatttggattcagtcctcagtgatcacacacgaaattctgccgaaggcacagaatatttcaaaatgcttgtagacgtttttgctccagaatttcgaaggccaaagaatatacatctccgaaatttctatataattgttccccctctgaccctcaactttgtagagcattccattagttgcaaggaaaaattaaataaaaaaaataaaattggagctgcctttactgatgatggctttgccatgggtgtggcttacattctaaagcttttggatcagtatcgggagtttgattcacttcactggttccagtctgttagagagaaatacctgaaggagataagagcagttgctaagcaacagaatgtacagtcagccagtcaagatgaaaaactcttacaaaccatgaatctcactcagaagcgactggatgtctatctacaggaatttgaattgctgtatttctcactgagcagtgcaagaattttcttcagagcagacaagactgcggctgaagaaaaccaagaaaagaaagagaaggaagaagaaactaaaacaagcaatggagacctgtctgacagcactgtgtctgctgatcctgttgtgaaatgatacggatggtattcactgcacatatgatgaaatcatcagaattgttaaaacttttgccagtggaatggataaactattgatgaattgtttcctgggtcacatctctggaaaatagatgttacagttcttaaaggcagtgctttaaagtgaagttcattctgtttccaaaggctctactttcaaaggttaagaatgagattttaaaattggatttttgcctggacttgagggtacaagatgtttctatttgaagtgaagttataaaagggcaaatccagattcataaactatcacctcggatttcttgtaatctacatgtttgtaatttgtatttgcatagatctttgatctatagttatttcaagtcatgggaaattcaatgcatatactatatacagccagtaaatacatgcttaacaaaaggaatgagcctgaagttcataaagaatacatatcaatattcttataaaaggaatatatgaagatggctttgatactagaggtgaggcacaagtgttttatgtactctcagtgtacagtataactgatgatccttctttcattgttaatttcatgtgactcacaagagctgctgatgtctttgatgagacattttataactagtttacattgctttgagaacatttaacctccaacagctgctttaaatttaagatttacttaatactcagaaaattcagataaagccatagagtcctgtttgaagcttcacttctattttggttgaaggcatgatgtatgatgtcagaaaaaaaattgaatgaattatttctacatccaaactcaggtttcttctacattagattgaattgaaattttggtgatggtttgggtagactttttttttatatcaagtataatttaaaacatcagattaaataattacactgttcaggcttttaaaaaaataccactgtgagaataaagcgctagtaagatacatcacttactgattttaaaaatacagaaagattttgagtaaattttgtgcccagcaagctgttagttttatttttgtaaaggtatgtaagttattaaatggttaatcatggccttttaaaaataaaataaagtgatacctttacaatgaagacaaaagtttaaaactttctaatacaaacaccattttgggaaatgcttgatttttttctattgcatttgtctgctaaacatttctttggataaatcctgcaaatacttctaacattattctttgattccagcttttagaatgggtgtacaatgccctgtttgtacttaatggttagggtcagggtaacttgccagcccaagataaatactttaatcgttaaaagtcagaagagacagaatatgtaggaaatgttttttgtttattatgtaaacatggcttacagaattatgaacagtggatagattaaaggcatttaatatttgtaattcataataactgtagaaatggccctaaagcatgctgcataattaataatttatattttcattattataagtgtttatatt

SEQ ID NO: 2580 - protein, 1196 aa, Homo sapiens
VAGVRPSSPHGLVGAVSVGGAGVMAVETLSPDWEFDRVDDGSQKIHAEVQLKNYGKFLEEYTSQLRRIEDALDDSIGDVWDFNLDPIALKLLPYEQSSLLELIKTENKVLNKVITVYAALCCEIKKLKYEAETKFYNGLLFYGEGATDASMVEGDCQIQMGRFISFLQELSCFVTRCYEVVMNVVHQLAALYISNKIAPKIIETTGVHFQTMYEHLGELLTVLLTLDEIIDNHITLKDHWTMYKRLLKSVHHNPSKFGIQEEKLKPFEKFLLKLEGQLLDGMIFQACIEQQFDSLNGGVSVSKNSTFAEEFAHSIRSIFANVEAKLGEPSEIDQRDKYVGICGLFVLHFQIFRTIDKKFYKSLLDICKKVPAITLTANIIWFPDNFLIQKIPAAAKLLDRKSLQAIKIHRDTFLQQKAQSLTKDVQSYYVFVSSWMMKMESILSKEQRMDKFAEDLTNRCNVFIQGFLYAYSISTIIKTTMNLYMSMQKPMTKTSVKALCRLVELLKAIEHMFYRRSMVVADSVSHITQHLQHQALHSISVAKKRVISDKKYSEQRLDVLSALVLAENTLNGPSTKQRRLIVSLALSVGTQMKTFKDEELFPLQVVMKKLDLISELRERVQTQCDCCFLYWHRAVFPIYLDDVYENAVDAARLHYMFSALRDCVPAMMHARHLESYEILLDCYDKEIMEILNEHLLDKLCKEIEKDLRLSVHTHLKLDDRNPFKVGMKDLALFFSLNPIRFFNRFIDIRAYVTHYLDKTFYNLTTVALHDWATYSEMRNLATQRYGLVMTEAHLPSQTLEQGLDVLEIMRNIHIFVSRYLYNLNNQIFIERTSNNKHLNTINIRHIANSIRTHGTGIMNTTVNFTYQFLKKKFYIFSQFMYDEHIKSRLIKDIRFFREIKDQNDHKYPFDRAEKFNRGIRKLGITPEGQSYLDQFRQLISQIGNAMGYVRMIRSGGLHCSSNAIRFVPDLEDIVNFEELVKEEGLAEETLKAARHLDSVLSDHTRNSAEGTEYFKMLVDVFAPEFRRPKNIHLRNFYIIVPPLTLNFVEHSISCKEKLNKKNKIGAAFTDDGFAMGVAYILKLLDQYREFDSLHWFQSVREKYLKEIRAVAKQQNVQSASQDEKLLQTMNLTQKRLDVYLQEFELLYFSLSSARIFFRADKTAAEENQEKKEKEEETKTSNGDLSDSTVSADPVVK

SEQ ID NO: 2581 - DNA, 2838 bp, Homo sapiens
ctccggcccggccccgagcaccgcctccccagccagcgccgccgcgatggcggaggacagcgagtctgcggccagccagcagagcctggaactggacgaccaggacacgtgcgggatagacggggacaatgaggaggagacggagcacgccaaaggaagtcctggagggtatttgggagccaaaaagaaaaagaagaaacagaagagaaaaaaggagaaaccaaattccggaggcaccaagtcagactcggcatctgattcccaggagattaaaattcagcagccttcgaaaaatcccagtgttccaatgcagaagttgcaggatatccagagagcaatggagctgctatccgcatgccagggcccagccaggaacattgatgaggctgcaaagcacagataccagttttgggacacacaaccggtaccaaaactagatgaagtcataacatctcatggtgcaattgaaccagataaagacaacgtacgccaagaaccgtattctttgccacagggttttatgtgggacactttagacttgagtgatgccgaagtgctcaaggagttatacacgttgttaaatgagaattacgtagaagatgatgacaatatgttccgatttgactattcacccgagttcctgttgtgggctctgcgtccaccaggctggctcctgcagtggcactgtggggtcagagtgtcttcaaataaaaaactggtcgggttcataagtgccatcccagcaaacattcggatttatgacagtgtgaagaagatggtagaaatcaactttctttgtgttcataagaagttgagatcgaaacgggtagccccagtgctaatccgagagatcactagaagagtgaacctggaagggatcttccaggctgtgtacaccgcgggagtggttcttcctaagcccatagccacatgcagatactggcatcgatcactaaaccccagaaaattggtagaagtgaaattttctcacttgagtagaaatatgactttacagagaacaatgaagctatacagacttccagatgttacaaagacttcaggtttgagaccaatggaaccaaaagatatcaaatcagttcgagaattaatcaacacttacctgaagcagtttcatctggctccagtgatggatgaagaggaagtagcccactggttcctcccccgggagcacattattgacacgtttgtagtggagagccccaacggtaaactgactgatttcctgagcttctatacgctcccctccacggtgatgcaccaccctgctcacaagagcctcaaagccgcctactcattctacaacatccacacagagacgcccctgctggacctcatgagcgacgcgctcatcctggctaaatcgaaaggatttgatgtattcaatgcactggatttgatggaaaataagacattcttggaaaaactcaagtttggtataggagatggcaatttgcagtattacctgtacaattggaggtgtccaggtacagattctgaaaaggttggactagtactacaatagatggatatttttatttctagaactctgacatcatcatttgttaatatttaatgatttctggaactgccattccaaagaagaataaaagcacaactcaagtgaaattgaagtagtcgataatcagaaaagatgacaaaagtccacatgtgacatttgtacgtttctagctagaatgttaaacttcatcctttttttactgttgacctatttgtgggagggatgaaaggctacaaagagcacattcttgtaattttcaaatttttgcctgtctcttgaagaggtattttttcacccttagaaaagggactgtttttctatggactaagtagaagttacagagtcatgtaagaaaatctttgctattgtgtggagagaaattgctgcatttctgtttcttaagtgatggtacatttgtccatgtaacagaacaaaagatccatttggaaattttttttactggtatcaccttacatggtatcactgggaacatttatggaatcaacacttctgtagctcagtgacaggtggtggttgtttaagtgcagagcaatattaaatgtactggtgactagtacatgtatttctccataagcagagttgccgaatcaataaacatgcaagtttgtactttgatctttaccaggtcagtggattgcttcaaaagcagagttttgtgcaagcactcactgtgctctctgaaagagcctgaggccgggcgtggtggctcacgcctgtaatcccagcactttgggaggccaaggtgggcagatcatgaggtcaggagatcgagaccattctggccaacatagtgaaaccccatctctactaaaaatacaaaaattagccgggcgtggtggcgtgtgcctgtagtcccagctgcttgggaggctgaggcaggagaatcgcttgaacctgagaggtgaggttgcagtgagccgagatcgagccactgcactccagcctgggtgacagagcgtgagactccgtctcaaaaaaaaaaaaaaaagaaagagcctgtacccgcgactaactagacttttcttgctgttgtgcaaagttcagtttcttctcagcaacatcaaggatatatgaagaaaaggaaataaaaaactgtaaagtcaaaagagatgcctggtggaacttattcgtgctatcagggcattgatagtttgaatgtttttattacttatgcaaaattgcacatactcctctatgctgattttatcatgaaaactgtcatgtgtcatgctaatggaaaatgtcttatttgtaaataagtattcataattttgccg

SEQ ID NO: 2582 - protein, 498 aa, Homo sapiens
MAEDSESAASQQSLELDDQDTCGIDGDNEEETEHAKGSPGGYLGAKKKKKKQKRKKEKPNSGGTKSDSASDSQEIKIQQPSKNPSVPMQKLQDIQRAMELLSACQGPARNIDEAAKHRYQFWDTQPVPKLDEVITSHGAIEPDKDNVRQEPYSLPQGFMWDTLDLSDAEVLKELYTLLNENYVEDDDNMFRFDYSPEFLLWALRPPGWLLQWHCGVRVSSNKKLVGFISAIPANIRIYDSVKKMVEINFLCVHKKLRSKRVAPVLIREITRRVNLEGIFQAVYTAGVVLPKPIATCRYWHRSLNPRKLVEVKFSHLSRNMTLQRTMKLYRLPDVTKTSGLRPMEPKDIKSVRELINTYLKQFHLAPVMDEEEVAHWFLPREHIIDTFVVESPNGKLTDFLSFYTLPSTVMHHPAHKSLKAAYSFYNIHTETPLLDLMSDALILAKSKGFDVFNALDLMENKTFLEKLKFGIGDGNLQYYLYNWRCPGTDSEKVGLVLQ

SEQ ID NO: 2583 - DNA, 2447 bp, Homo sapiens
ctggaactcgcgtctgagccgccgtcccggacccccggtgcccgccggtccgcagaccctgcaccgggcttggactcgcagccgggactgacgtgtagaacaatcgtttctgttggaagaagggtttttcccttccttttggggtttttgttgccttttttttttcttttttctttgtaaaattttggagaagggaagtcggaacacaaggaaggaccgctcacccgcggactcagggctggcggcgggactccaggaccctgggtccagcatggaggtggtggacccgcagcagctgggcatgttcacggagggcgagctgatgtcggtgggtatggacacgttcatccaccgcatcgactccaccgaggtcatctaccagccgcgccgcaagcgggccaagctcatcggcaagtacctgatgggggacctgctgggggaaggctcttacggcaaggtgaaggaggtgctggactcggagacgctgtgcaggagggccgtcaagatcctcaagaagaagaagttgcgaaggatccccaacggggaggccaacgtgaagaaggaaattcaactactgaggaggttacggcacaaaaatgtcatccagctggtggatgtgttatacaacgaagagaagcagaaaatgtatatggtgatggagtactgcgtgtgtggcatgcaggaaatgctggacagcgtgccggagaagcgtttcccagtgtgccaggcccacgggtacttctgtcagctgattgacggcctggagtacctgcatagccagggcattgtgcacaaggacatcaagccggggaacctgctgctcaccaccggtggcaccctcaaaatctccgacctgggcgtggccgaggcactgcacccgttcgcggcggacgacacctgccggaccagccagggctccccggctttccagccgcccgagattgccaacggcctggacaccttctccggcttcaaggtggacatctggtcggctggggtcaccctctacaacatcaccacgggtctgtaccccttcgaaggggacaacatctacaagttgtttgagaacatcgggaaggggagctacgccatcccgggcgactgtggccccccgctctctgacctgctgaaagggatgcttgagtacgaaccggccaagaggttctccatccggcagatccggcagcacagctggttccggaagaaacatcctccggctgaagcaccagtgcccatcccaccgagcccagacaccaaggaccggtggcgcagcatgactgtggtgccgtacttggaggacctgcacggcgcggacgaggacgaggacctcttcgacatcgaggatgacatcatctacactcaggacttcacggtgcccggacaggtcccagaagaggaggccagtcacaatggacagcgccggggcctccccaaggccgtgtgtatgaacggcacagaggcggcgcagctgagcaccaaatccagggcggagggccgggcccccaaccctgcccgcaaggcctgctccgccagcagcaagatccgccggctgtcggcctgcaagcagcagtgaggctggccgcctgcagcccgtgtccaggagccccgccaggtgcccgcgccaggccctcagtcttcctgccggttccgcccgccctcccggagaggtggccgccatgcttctgtgccgaccacgccccaggacctccggagcgccctgcagggccgggcagggggacagcagggaccgggcgcagccctcccccctcggccgcccggcagtgcacgcggcttgttgacttcgcagccccgggcggagccttcccgggcgggcgtgggaggagggaggcggcctccatgcactttatgtggagactactggccccgcccgtggcctcgtgctccgcagggcgcccagcgccgtccggcggccccgccgcagaccagctggcgggtgtggagaccaggctcctgaccccgccatgcatgcagcgccacctggaagccgcgcggccgctttggttttttgtttggttggttccattttctttttttctttttttttttaagaaaaaataaaaggtggatttgagctgtggctgtgaggggtgtttgggagctgctgggtggcaggggggctgtggggtcgggctcacgtcgcggccgcctttgcgctctcgggtcaccccgctttggcggcccggccggagggcaggaccctcacctctcccccaaggccactgcgctcttgggaccccagagaaaacccggagcaagcaggagtgtgcggtcaatatttatatcatccagaaaagaaaaacacgagaaacgccatcgcgggatggtgcagacgcggcggggactcggagggtgccgtgcgggcgaggccgcccaaatttggcaataaataaagcttgggaagcttgaaaaaaaaaaaaaaaaaaaaa

SEQ ID NO: 2584 - protein, 433 aa, Homo sapiens
MEVVDPQQLGMFTEGELMSVGMDTFIHRIDSTEVIYQPRRKRAKLIGKYLMGDLLGEGSYGKVKEVLDSETLCRRAVKILKKKKLRRIPNGEANVKKEIQLLRRLRHKNVIQLVDVLYNEEKQKMYMVMEYCVCGMQEMLDSVPEKRFPVCQAHGYFCQLIDGLEYLHSQGIVHKDIKPGNLLLTTGGTLKISDLGVAEALHPFAADDTCRTSQGSPAFQPPEIANGLDTFSGFKVDIWSAGVTLYNITTGLYPFEGDNIYKLFENIGKGSYAIPGDCGPPLSDLLKGMLEYEPAKRFSIRQIRQHSWFRKKHPPAEAPVPIPPSPDTKDRWRSMTVVPYLEDLHGADEDEDLFDIEDDIIYTQDFTVPGQVPEEEASHNGQRRGLPKAVCMNGTEAAQLSTKSRAEGRAPNPARKACSASSKIRRLSACKQQ

SEQ ID NO: 2585 - DNA, 5203 bp, Homo sapiens
cagaaaaatcaccaaagtcacctaattcagtgaaagcagaaaaagcatccagttatcagatgaagtcagaaaaagtaccaagttcaccagcagaagcagaaaagggacccagtttactgttgaaagacatgagacagaagacagaattacaacagattggaaaaaaaattccaagctcctttacttctgtggacaaagtgaatattgaagctgtagggggagaaaaatgtgctctgcaaaactcaccacgatctcagaagcaacagacatgtacagataatactggtgattctgatgatagtgcttcaggaattgaagacgtatcggacgatttaagtaaaatgaagaatgatgaatctaataaagaaaattcttcagagatggactacttagaaaatgccactgtgatagatgaatctgcattgacacctgagcagaggctggggttgaaacaagcagaagaacgcttagaaagagatcacatctttcgacttgaaaaacgatcaccagaatataccaattgtcggtatctatgcaaactttgcttaattcacattgaaaatatccagggggctcataaacatataaaggagaaacgacataagaaaaatattttggaaaaacaagaagaaagtgagcttcgttctctgccacctccttcccctgcccacttggctgctttaagtgttgcagtcattgaattagcaaaagaacatggaataacagatgatgacctcagagtccgtcaggaaattgtggaggaaatgtcaaaggttataacgacatttttaccagaatgttcacttaggttgtatggctcatctctgactagatttgctctgaaaagtagtgatgttaatatagatataaaatttcctcccaagatgaatcatccagatcttctgataaaagtacttgggattttaaagaaaaatgtattatatgtagatgtggaatctgattttcacgctaaagttcctgttgtggtgtgcagagatcgaaaaagtggtttactttgtagagtgagtgcaggaaacgatatggcatgtctcactactgatttacttactgcccttggcaaaatagaacctgtctttattcccttggtgttagcctttcgctactgggctaagttgtgctatattgactcccaaactgatggtggaatcccttcttactgttttgctttaatggtgatgttttttctacaacagagaaaaccccctcttcttccttgcttacttggaagttggattgaaggctttgacccaaaaagaatggatgactttcagctgaagggcatagtagaagagaagtttgtgaagtgggaatgtaattcaagtagtgcaactgagaaaaactcaattgctgaggaaaacaaagctaaggcagaccaaccaaaagatgataccaagaagacagaaacagacaaccaaagtaatgccatgaaggaaaaacatggcaaatctcctttagcattggaaacaccaaatcgggtatccttgggacagttatggttagagctgcttaaattctacacactggattttgctttggaggaatatgtcatatgtgtacggatacaagatattttaacaagagaaaataaaaactggcctaaaaggcgaatagccattgaagatccattttcagtcaagaggaatgttgcacggagcttaaacagccagctggtttacgaatatgttgtggagagatttagggcagcttatcggtattttgcctgtcctcagacgaagggtggaaataagtctacagtggatttcaagaaaagagagaaggggaaaataagcaataagaaaccagtcaagtcgaacaatatggcaaccaatggttgtattctgcttggggaaaccacagaaaaaataaatgcagaaagagagcaacctgttcaatgtgatgaaatggactgtacatcacagagatgtattattgacaacaacaatttgttggtaaatgaactagattttgctgaccacggacaggactcttcatctctttctaccagcaaaagcagtgaaatagagccaaaattagataagaaacaagatgatttagcgccttcagaaacttgtttaaaaaaagagctcagccaatgtaattgcattgatttgtctaagtcgcctgacccagataaatctactggaacagactgcaggtcaaatttagaaacagagagttcacatcagagtgtgtgcaccgacacatctgctacctcttgcaactgcaaagctacagaagatgcttctgaccttaatgatgatgataacctccccacccaggaattatattatgtgtttgataagtttattttaacctctggcaagccaccaacgatagtatgcagcatctgcaaaaaggatggccattcaaagaatgattgcccagaggattttaggaaaattgatttaaaacctctaccaccaatgacaaaccgatttcgggaaatacttgatttagtatgtaaaagatgttttgatgagttatcaccaccttgttctgaacaacacaacagggagcaaattttaattggcttggaaaagtttattcaaaaagaatatgatgaaaaggcaaggttgtgcttatttggctcttctaagaatggatttggatttcgtgatagtgatctggatatttgtatgaccctggaaggccatgaaaatgcagagaaattaaattgtaaggaaataattgaaaatttggcaaaaattcttaagagacatccaggtttaagaaacattttgcctataactactgccaaagtgcctatagtaaaatttgaacacaggcgaagtgggttagaaggcgatatcagtttatataatacgttggctcaacataacacaagaatgctagctacttatgcagctattgatcctagagtgcagtatttgggatatactatgaaagtgtttgctaagcgatgtgacattggggatgcttccaggggaagtttatcttcatatgcatatatccttatggtgctgtactttctgcagcagagaaagccacctgttatcccagttctacaagagatctttgatggaaaacagattccacagagaatggttgatggatggaatgctttcttctttgataaaacagaagaactgaaaaagcgtttaccttcacttggaaagaacacagaatcattaggggagctttggctgggactgcttcgtttctatactgaagagtttgatttcaaggaatatgtaattagcattcggcagaaaaagctgttgacaacttttgagaagcagtggacttccaagtgcattgcaattgaagacccttttgacttgaatcataaccttggtgctggagtttccagaaaaatgaccaatttcatcatgaaagcatttatcaatggaaggaaactttttggtacccctttttatccactcattggcagagaagctgagtacttctttgattccagagtattaacagatggagaactggctcccaatgatagatgttgccgtgtgtgtggaaaaataggccactacatgaaagactgccctaaaaggaaaagtttactgtttagactaaagaagaaagacagtgaagaagagaaggaagggaatgaagaagagaaagattcccgagatgttcttgacccccgagacctccacgatactcgagactttagagacccgagagacctcagatgttttatatgtggagatgctggacatgtacgaagggagtgcccagaggtcaagctggcccgtcagaggaatagcagtgtggcagcagcccagctggtccgcaaccttgtaaatgctcaacaggtggctggttcagctcagcaacagggtgatcagtccataaggactagacagtcatcagaatgttctgaatcaccatcttattctcctcagcctcagccatttccacagaactcttcccagtcagctgctattactcagccttcatctcagccaggatcccaacctaagcttggcccacctcagcagggagcccaacctccccatcaggtccagatgccactgtataactttccccagtcaccaccagctcagtattctcccatgcacaatatgggattgttgccaatgcaccctctccagatccctgccccgtcctggcccatccatggcccagtgatccactctgcaccaggcagtgcccccagcaatattggcctaaatgatcccagcatcatctttgcacagcctgctgccagacctgtggcaatccctaacacgtctcacgatggacactggccccgtactgtggctccaaattccctggtaaacagtggtgcagtggggaattcagagccaggctttcgaggactgactcctccaattccttgggaacatgcaccgcgtccccatttcccccttgtcccagcttcgtggccttatggtttgcatcaaaacttcatgcatcagggaaatgcccgattccagcccaacaaacctttctatactcaagacagatgtgccacccgtcggtgtagagagcgttgtccccacccaccaagaggaaacgtgtcggagtaatgcgagtccattttctttcagctggtctaccgatgcacagcaaccagccaatcctgctgtctcaagggtatccgtacctcaatgtcagttacattcagcagaaaaagtgacatttaatggaaagcaaaacaaatcaggtcctgatttaaaattttaacacgtttagatagcttatttaaattctaagactgtttttacagactgtattatttgtatataaatatgaactatagtttttactagtatcaccaaattgagtgatacaaatttcatctattttattaccctatttttaagggaattttatgttttgtttaaccttgatgaattgtataaagagagaatttaaaaaattacattctttattttctattagctgtattcatactttggttgcttcagactttatatattgttcttaaaagttaggaaagaatttcatgtgttttaaattgtcacttctattctttacagaaccttgtagtgccaaaaactttttaaaaggtaaaaaaataaaataaaattacaacatgaagattcagattttttttcttttccatacttgtatattgaacattcaaacttgaatggaaagttgattttgtctgtatttgaagtacttctattttaagttaataaatctttttgac

SEQ ID NO: 2586 - protein, 1516 aa, Homo sapiens
EKSPKSPNSVKAEKASSYQMKSEKVPSSPAEAEKGPSLLLKDMRQKTELQQIGKKIPSSFTSVDKVNIEAVGGEKCALQNSPRSQKQQTCTDNTGDSDDSASGIEDVSDDLSKMKNDESNKENSSEMDYLENATVIDESALTPEQRLGLKQAEERLERDHIFRLEKRSPEYTNCRYLCKLCLIHIENIQGAHKHIKEKRHKKNILEKQEESELRSLPPPSPAHLAALSVAVIELAKEHGITDDDLRVRQEIVEEMSKVITTFLPECSLRLYGSSLTRFALKSSDVNIDIKFPPKMNHPDLLIKVLGILKKNVLYVDVESDFHAKVPVVVCRDRKSGLLCRVSAGNDMACLTTDLLTALGKIEPVFIPLVLAFRYWAKLCYIDSQTDGGIPSYCFALMVMFFLQQRKPPLLPCLLGSWIEGFDPKRMDDFQLKGIVEEKFVKWECNSSSATEKNSIAEENKAKADQPKDDTKKTETDNQSNAMKEKHGKSPLALETPNRVSLGQLWLELLKFYTLDFALEEYVICVRIQDILTRENKNWPKRRIAIEDPFSVKRNVARSLNSQLVYEYVVERFRAAYRYFACPQTKGGNKSTVDFKKREKGKISNKKPVKSNNMATNGCILLGETTEKINAEREQPVQCDEMDCTSQRCIIDNNNLLVNELDFADHGQDSSSLSTSKSSEIEPKLDKKQDDLAPSETCLKKELSQCNCIDLSKSPDPDKSTGTDCRSNLETESSHQSVCTDTSATSCNCKATEDASDLNDDDNLPTQELYYVFDKFILTSGKPPTIVCSICKKDGHSKNDCPEDFRKIDLKPLPPMTNRFREILDLVCKRCFDELSPPCSEQHNREQILIGLEKFIQKEYDEKARLCLFGSSKNGFGFRDSDLDICMTLEGHENAEKLNCKEIIENLAKILKRHPGLRNILPITTAKVPIVKFEHRRSGLEGDISLYNTLAQHNTRMLATYAAIDPRVQYLGYTMKVFAKRCDIGDASRGSLSSYAYILMVLYFLQQRKPPVIPVLQEIFDGKQIPQRMVDGWNAFFFDKTEELKKRLPSLGKNTESLGELWLGLLRFYTEEFDFKEYVISIRQKKLLTTFEKQWTSKCIAIEDPFDLNHNLGAGVSRKMTNFIMKAFINGRKLFGTPFYPLIGREAEYFFDSRVLTDGELAPNDRCCRVCGKIGHYMKDCPKRKSLLFRLKKKDSEEEKEGNEEEKDSRDVLDPRDLHDTRDFRDPRDLRCFICGDAGHVRRECPEVKLARQRNSSVAAAQLVRNLVNAQQVAGSAQQQGDQSIRTRQSSECSESPSYSPQPQPFPQNSSQSAAITQPSSQPGSQPKLGPPQQGAQPPHQVQMPLYNFPQSPPAQYSPMHNMGLLPMHPLQIPAPSWPIHGPVIHSAPGSAPSNIGLNDPSIIFAQPAARPVAIPNTSHDGHWPRTVAPNSLVNSGAVGNSEPGFRGLTPPIPWEHAPRPHFPLVPASWPYGLHQNFMHQGNARFQPNKPFYTQDRCATRRCRERCPHPPRGNVSE

SEQ ID NO: 2587 - DNA, 1564 bp, Homo sapiens
cggacagtgagaaggtcaggtgagggcggcagcaccagctccccttgtcccgccctgttcatcctcccattaccaccgcccccacacactcacacgcacacttacgcacagatcattgcagcggatgagatggggctatgacagaagcctcaggctcgtttccttctccctcctccagccccctcccggcttccagcccattctctttgcagctggggttcctaccttaccctactcccagctccttttccccgcggatggagagatggactctgctgcttacccacccactcccctgcagggggtggaggactgattcagctactgtatccccactgctgtgactggaaatgggggtggggagtgactggtcttttcaaccctggggagttgaggaaaatgtctgctttcacttcagctttcatttgaatactgtgatctggtttttattttgaaatgtataaaaagcaaacccagctacaaaggccttttcacccttccactttgtaactaatcccagtctcttctcatcactcctcctcttacagtactctgctattcatgctcatttcatgttcttaatcttctttcctgtttaaaaattttttttttggaaaaaatttgaaatcatggtccttttttctgctgaatatattctatatattatatatatataaattatatatatatatatatacatatatatgtctggctacctcgttttagtttactttttttctgaagccctggaattctacaagagagatattttgagactgaaacatgtttgtgcctagactggaaagatgcccttgggtttgtccgtctttttgtgttggcttcttcccagcctccatccgtccagtgtgccccacttccacattctggctataatttcctttttctccttgttcattgggatttgaggacctatttctaaatcttaatttatagcacaaatatgtgggagcaatgagagttgaaccgttgtttttgttggagatgcagattgtgtcttgaaaatgatgattatatatgcaaattctgccctaccctcaccctcttccaagtttccccccaaaaaggtcacacagtgcggcttcctgtgggaaacaggagcagagctggcctgcagagcccctggggctgtgatgaagctcatatcttatctctgttctattaacaaaatgggagtttgtgggttttaaaaaaattccgtttctaaatggaggaatagatgactttctttcttttggtgggggttgggacttgtggctttaaagaaatcacttctgagtaggatgtatattttcgttggatttttgttgttatttctttagaaccctccacagcaacatgcaagaccatggagttaaagaaacccagagacctttatcaattaattgtactgtttgtgaatttgtataaataataacaaagatcctcttaaaacgtttatattcttacagtaaaaggttaaactgatatttatataataaaagaggaaatatgaagtatgtttttgaaaaaaaaaaaaaacaaaaaaaaaaaaaaaaaaaaaaaa

SEQ ID NO: 2588 - DNA, 4656 bp, Homo sapiens
aagatggctgcccacgggggctccgcggcgtcctcggcgctgaaggggttaattcaacagttcaccaccattaccggtgcaagtgaaagtgtaggaaaacatatgcttgaagcgtgcaacaataatctggaaatggcagtcactatgtttttggatggtggaggaatcgctgaagagcccagtaccagttcagcaagtgtctctactgtcagaccacacacagaagaagaagttcgtgccccaattcctcaaaagcaggaaatactggtggaaccagaaccattatttggtgctcctaaaagacgacggcctgcacgttcaatttttgatggtttccgggattttcagactgaaactattcggcaagaacaagaattaagaaatggaggagctatcgataagaaattaactacccttgcagatctattccggccacccattgatttgatgcataaaggcagctttgaaacagccaaagagtgtggccagatgcaaaataagtggctgatgataaacattcaaaatgttcaagactttgcatgtcagtgcctcaaccgcgatgtgtggagcaacgaagctgtgaagaatattatccgggaacatttcattttctggcaggtttatcatgacagtgaggaaggtcagagatacatacagttttataagttaggggatttcccctatgtttccatattggacccacggacaggtcagaagctagtagaatggcaccagttagatgtatcttctttcttggaccaagtgacgggatttctgggtgaacatggacaactggatggactttctagcagtccccccaaaaaatgtgcccgttcagagagccttatagatgcaagtgaagacagccagctagaagctgccatcagagcctccttacaagaaacacattttgattcaacacagacaaaacaggatagccgctcagatgaagaatctgaatctgaacttttttctggcagtgaggagttcatatccgtttgtggctctgatgaagaagaagaggtagagaatcttgccaagtccagaaagtctccccacaaagatttggggcatagaaaagaggagaatagaaggccgctgactgagccaccagtcagaactgatcctggaacagccacaaaccaccaaggattgccagctgtggattcagagatactggagatgccacctgaaaaagcagatggagtagtggaggggatagatgtaaatggaccaaaagcacagctgatgttgcggtatccagatggaaaaagggaacagatcactcttccagagcaagctaaactgctagctttggtgaagcacgtgcagtctaaaggatacccaaatgaacgttttgaacttctcaccaactttcctcgaaggaaattatctcatctggactatgatattacattgcaagaggcaggcctttgtcctcaagagactgtctttgtacaggaaagaaattaacaccatggcttgacctctctcagcttaccccttttttcccttttcctgtgagatacatgtcactaagtatgcattttggctcataggaccacagagccaaagttgggcaagcaagtcaccttccttctcttatttcttgatctctcctataatcagtctctttctccccctttgtttctttctcctcttctgttttctcgctccccactccgtacccttctgcctccccctccccccacacttttctttcttacctaatctggtgaccaaactgaagtgtaaggataagacctctcctagtactagcagcaggaattgtgtgttccagtaagtggtctcttgcacggcacttttttgggatcaaatgttaacgttactccccagactcttcgggcaaaggaatggctagattcagagtaagaacaaccctcccttttttgtaagtccccgtgtttagcagggagaagaaattctctaacatgggtttggttttgttgtgttcttcatgtggaaatgtcgcttaacaaaatatccaggcttttgtttacgtggaaaaagcatcccttgtaatgattgctcatcatacttaaaaacctttttcaaaggattttcatgttcccagctataaggactatttccatgacgtgttattggcagaatgagtgttaaatatggagcatatagcatggggtgactttcattgtcctaacctgagacagttttccttattactctgtattgatcctgctagtccaagaatggacatgaagtgaacctatcgtggtgactgggataggaaggtgcttgctatttttgccagcacagcatattagttcctttggagccctccattgtctgagtctgcagtgatctgtaggaaggcagctggtcaataatcatgtagtacaatggcttggaattgtaaccactatggttattgattgtcctgtgttgtttcaggcatacttaggtatgtccctggggaaaaagaaaaccattcagctgagagttgctaaccatgttcttttggttagaaataatggttcattttttgcccctggttggaatagtctctaaaaggctctggtgactgaattgaacatgagtccgcatgctgttttctttcaaaaggtatcaaaacggaaagcctctctaaggggaagacctttcaactccattcagaagacaacatttagtaaggaggatggcggaggttactagtaattttcagatgtcttgggctttttctgccaacaaaacccaaaatcaaattagagttggtgaaagctttcttcagtgtttttagaagaggccatcttgaatctgtagaataccatttacacatcaacttcaccctatgctcatttcgtattttgagcttaaatggagtcctctgaagggggggtagtcgtgattctggtggcaaaactagaacttttaacttgtaaaatgaaaaatattaaatggacctttttgtcagttgaggatttagattgattcttttatctgaggagcgtatgttcctcagatgttgcgtagagacctttaggttttcatctactttaagattgctctcttggcaattaggggatttgggaaaagaagaaaaaaagatgccatgtgttgctagtacacagttataggatatggtttctaatggttgaattttgaggaactctccctaaagaatgagttttatatctcctcaaggaaatcatggaaaaatctgtttattcttcagtgagtccttttgaattaatgttcttaaatttttttctaagtctgtgtaagtgcttatgtataagtatataattgtataaatatttataaatatatttatataattacggtttcatttctaccttgagtcaaagttctgtctttagattggtgactgagtaatacttacactttggtgttttttcttaggttcttgaggcttacttaactagcagcttctgatttattgagtgaaagatggttttcatgttaattcctcagttgcatctctgaacttggataacatacttgccgtttgaaaaatagagctgtatactgtcaaaggtgcactggagggtaaaacatttgttggtagtagacaagctcagaaatccaaaaattcagggagggcacagggtaagaagagaggtttgctcagctttgtgctctgatggcacccatctgtactccagcaaagtcatagctgaagcccaaatcgctcaaacgtgtgaagtcaatcatttttcctatagggctctgtttccttttctttaccttctagcttctcttgataaaacagttgggagaactgccaacgtgttcatcagtgagagggtgtggttctttccgatatgttcagcacgtgcatattcatttatgagaaaccaaagtaacttcttcaactcgggttactgtgggatgattaagtagatataaagtgatttaaaagacagcatggtactttcactcagcttaacatgcagctgggatgtctacaatacaagatgtggtgggttttattttattttattttgaggcaggagtgtaattatcttagggttgatataaaggcccatgggaagagttacggattgtacatgggaagaatccataaggagtattgccttgctcaagaatttaatccgctgacagtatgcttcttccagtttgccttacttcctctgcaagtttctttgctccttagggcagaggttttattgaatagattaaatgaggtcagtaagattagttaaaaatagtcattccttgtgggtgttggacacagcttgaaaggagtgtttaaaaaaaaaaagctagggaggaaaagaacaagaaagatagacttcgagagtgataagagaaaaatacagggagatggaatggaaactaccaggaaggccgggcgcggtggctcatgcctgtaatcccaacactttgggaggcggaggtgggcagatcacctaaggtcaggagatcgaggccagcctgagcaacatggtgaaaccccgtctctactaaaaatacaaaaattacctgggtgtggtggcgtgcacctgtaatcccagctactcagaggctgaggcaggggaatggcttgaacctgggaggcagaggttgcagtgagccaagatcgcaccattacactccagcctgggcgacaaagcgacactccatctcaaattt

SEQ ID NO: 2589 - protein, 490 aa, Homo sapiens
KMAAHGGSAASSALKGLIQQFTTITGASESVGKHMLEACNNNLEMAVTMFLDGGGIAEEPSTSSASVSTVRPHTEEEVRAPIPQKQEILVEPEPLFGAPKRRRPARSIFDGFRDFQTETIRQEQELRNGGAIDKKLTTLADLFRPPIDLMHKGSFETAKECGQMQNKWLMINIQNVQDFACQCLNRDVWSNEAVKNIIREHFIFWQVYHDSEEGQRYIQFYKLGDFPYVSILDPRTGQKLVEWHQLDVSSFLDQVTGFLGEHGQLDGLSSSPPKKCARSESLIDASEDSQLEAAIRASLQETHFDSTQTKQDSRSDEESESELFSGSEEFISVCGSDEEEEVENLAKSRKSPHKDLGHRKEENRRPLTEPPVRTDPGTATNHQGLPAVDSEILEMPPEKADGVVEGIDVNGPKAQLMLRYPDGKREQITLPEQAKLLALVKHVQSKGYPNERFELLTNFPRRKLSHLDYDITLQEAGLCPQETVFVQERN

SEQ ID NO: 2590 - DNA, 1195 bp, Homo sapiens
ggcacgaggcgccagtcccctaaccctgaggctgccgcgcggcggtcactgcgccggggtagtgggccccagtgttgcgctctctggccgttccttacactttgcttcaggctccagtgcaggggcgtagtgggatatggccaactcgggctgcaaggacgtcacgggtccagatgaggagagttttctgtactttgcctacggcagcaacctgctgacagagaggatccacctccgaaacccctcggcggcgttcttctgtgtggcccgcctgcaggattttaagcttgactttggcaattcccaaggcaaaacaagtcaaacttggcatggagggatagccaccatttttcagagtcctggcgatgaagtgtggggagtagtatggaaaatgaacaaaagcaatttaaattctctggatgagcaagaaggggttaaaagtggaatgtatgttgtaatagaagttaaagttgcaactcaagaaggaaaagaaataacctgtcgaagttatctgatgacaaattacgaaagtgctcccccatccccacagtataaaaagattatttgcatgggtgcaaaagaaaatggtttgccgctggagtatcaagagaagttaaaagcaatagaaccaaatgactatacaggaaaggtctcagaagaaattgaagacatcatcaaaaagggggaaacacaaactctttagaacataacagaatatatctaagggtattctatgtgctaatataaaatatttttaacacttgagaacagggatctgggggatctccacgtttgatccgttttcagcagtgctctgaaggagtatcttacttgggtgattccttgtttttagactataaaaagaaactgggataggagttagacaatttaaaaggggtgtatgagggcctgaaatatgtgacaaatgaatgtgagtaccccttctgtgaacactgaaagctattctcttgaattgatcttaagtgtctccttgctctggtaaaagatagatttgtagctcacttgatgatggtgctggtgaattgctctgctctgtctgagatttttaaaaatcagcttaatgagagtaatctgcagacaattgataataacattttgaaaattggaaagatggtatactgtttttagaggaataaacgtatttgtggtttaaaaaaaaaaaaaaaaaaaaaaa

SEQ ID NO: 2591 - protein, 188 aa, Homo sapiens
MANSGCKDVTGPDEESFLYFAYGSNLLTERIHLRNPSAAFFCVARLQDFKLDFGNSQGKTSQTWHGGIATIFQSPGDEVWGVVWKMNKSNLNSLDEQEGVKSGMYVVIEVKVATQEGKEITCRSYLMTNYESAPPSPQYKKIICMGAKENGLPLEYQEKLKAIEPNDYTGKVSEEIEDIIKKGETQTL

SEQ ID NO: 2592 - DNA, 7618 bp, Homo sapiens
aagaatcagaagacatttgtgctttggggagcagaggccctcagggtatagagaaggaagaagagagaggttcactgtagtcctgaagcagaaataagacctgtggctgaaggaagccttagcaattcactccttcctcttcctgagaactctctgtaggaagtctcacctagcagaggcttcacagtatttcagagaagccaaagattgtttgcctctttggaaactgttatccttccatcatgactgtgtcactcctgccactgttccaccatagagatggcgtcctttgcagcaaaccgtaagttataaggatgagggaagaagagtagagggccaaaaggattccattttgaggaaaaactacagtttgccttgccaggtagaagaatcaggcgcccagacaccatgtcacaaccctccagaactgacgttggcaggaagtagagactttgttgcctgtgtcccccatcctcaccatgtcttcgactcaggacaatggggaacactggaagtccctggagtctgtgggcatcagccgcaaagaactagcgatggccgaagccctgcagatggagtatgatgccctgtcccggctccggcatgacaaggaggagaacagagccaagcagaacgcagacccctctctcatcagctgggatgagcctggggtagacttttacagcaagccagcaggaaggcggaccgacctcaagctgttacgcggtctctctggctctgatcctacccttaactacaactcactatccccacaggaagggccgcccaaccactctacctcccaagggccacagcctggctcagatccctggcccaaaggctccctgtctggagactatctctacatttttgatggttcagatgggggagtctcttcgtccccaggaccaggggacatagagggctcttgcaagaaactatccccacctcctctgcctccccgagcttctatctgggatacccctcccctgcctcccagaaaggggtccccctcatcctccaagatctcccagcccagtgacatcaacactttctctttggtcgaacaattgccaggcaaactgctagagcatcggatcctagaagaggaagaggtgctgggaggtgggggtcaggggcgcctactggggtctgtggactatgatggtatcaatgatgcaattactaggctcaacttgaaatcgacctatgatgcggagatgttgcgggatgccaccaggggctggaaggagggccgagggccgctggacttcagcaaagacacctctggaaaacccgtggccaggagcaagactatgccccctcaggtgcccccccgcacctatgcctcccgctatggcaaccgaaagaatgcgacgcctggcaagaaccgccggatttctgcagccccggtgggctcccggccccacactgttgccaatggccatgagttgtttgaggtctcagaagagagagatgaggaggttgctgcattttgccacatgctggatatccttcgatctggctctgacatccaagactacttcctcactggctatgtctggagtgctgtcacccctagcccagagcacctcggggatgaggtcaacctgaaggtgactgtgttgtgtgacaggcttcaagaggcactcactttcacctgcaactgttcctccactgtagacttgcttatctaccagaccctgtgctacacccatgatgacctgaggaatgtggacgtgggtgactttgtgctaaagccctgcgggctggaggagttcctgcagaacaagcatgccttgggcagtcatgagtacatccaatactgccgcaagtttgacattgacattcggctacagctgatggagcagaaggttgtgcgcagtgacctggcccggacggtgaatgatgaccagagcccctccaccttgaactacctcgtccatctccaagagaggcctgtcaagcagaccatcagcaggcaggccctgagtcttctgttcgacacttaccacaatgaggtggatgccttcctgctggctgatggagacttcccactgaaggctgacagggtggtccagtccgtcaaggccatctgcaacgccctggccgccgtggaaacccctgagatcaccagtgctctcaaccagctgcccccctgcccctcccgcatgcagcctaaaattcagaaggatcccagtgtcttggctgtgagggaaaaccgagagaaggtcgtggaagccctgaccgctgccatcttggacctggtggagctgtactgcaacacattcaacgcagacttccagacggcagtgcccgggagccgcaagcatgacctggtccaggaggcctgccatttcgccaggtccctggccttcactgtctatgccacccaccgcatccccatcatctgggctaccagctatgaagatttctacctctcctgctccctcagccatggcggcaaggagctgtgcagccccctgcagacccgaagagctcacttctccaagtacctcttccacctcatcgtctgggaccagcagatctgcttcccagtgcaggtgaaccggctgcctcgggagacactgctgtgtgccactctctatgctctgcccatccccccaccggggagctcctcagaggccaataagcagcggcgggtgcctgaagccctgggctgggtcactaccccactcttcaacttcaggcaggtcctgacctgtggccggaagcttctgggtttgtggccagcaacacaggaaaatcccagcgcccgttggagtgcacctaatttccaccagccagacagtgtcatcctgcagattgacttccccacctcggcctttgacatcaagttcaccagcccccctggagacaagttcagcccccgctatgagtttggcagcctccgggaagaagaccagcgcaagcttaaagacatcatgcagaaagagtccttgtactggctcactgatgctgacaagaagcgcctgtgggagaagcgatattactgccactcggaggtgagctcgctccccctggtgctcgccagcgcccccagctgggagtgggcttgcctgcctgacatctatgttctcctgaagcagtggacccacatgaaccaccaggatgccctggggctcctgcatgccaccttcccggaccaggaggtgcgtcgtatggctgtgcagtggattggctcactctcagatgctgagctgctagactacctgccccagctggtacaggccctgaagtatgaatgctacctggacagcccgttggtgcgcttcctcctgaaacgagctgtgtctgacttgagagtgactcactacttcttctggttactgaaggacggcctcaaggactctcagttcagcatccgctaccagtatctgctggcagccttactgtgctgctgtggcaaggggctgagagaagagtttaaccgccagtgctggcttgtcaatgccctggccaaactggcccagcaggtccgggaggcagccccatctgcaaggcagggaatcctccgcacgggcctggaggaggtgaagcagttctttgccctcaatggctcgtgccgcttgccactcagccccagtctgctggttaagggaattgtgcccagggactgttcctacttcaactccaatgctgtccccctcaaactctccttccaaaatgtggatcccctgggtgagaacatccgtgtcatcttcaagtgtggggacgaccttcgccaggacatgctaacgctgcagatgattcgcatcatgagcaagatctgggtccaggaggggctggacatgcgcatggtcatcttccgctgcttctccaccggccggggcagagggatggtggagatgatccctaatgctgagaccctgcgtaagatccaggtggagcatggggtgaccggctcgttcaaggaccggcccctggcagactggctgcagaaacacaaccctggggaggacgagtatgagaaggctgtggagaactttatctactcctgcgctggctgctgcgtggccacgtacgtcttgggcatctgtgaccgacataatgacaacatcatgctgaagaccactggtcacatgttccacattgattttggccgcttcctgggccatgcccagatgtttggcaacatcaagcgggaccgtgccccctttgtcttcacctcggacatggcgtatgtcatcaacgggggtgacaagccttccagccgcttccatgattttgttgacctttgctgccaagcctacaacctcattcgcaagcacacccacctcttcctcaaccttctgggcctgatgttgtcctgtgggatccctgaactctcagacctggaggacctcaagtatgtgtacgatgccctgaggcctcaggatacagaggccaatgccactacctacttcactaggttgattgagtccagcctgggcagtgtagccacaaagctcaattttttcatccataatctggctcagatgaagttcacgggctcagatgaccggctgaccctctcctttgcctcccgaacacacactctcaagagctctggccgaatcagtgatgttttcctctgccgccatgagaagatcttccaccccaacaaaggctatatatatgtggtaaaggtgatgcgagagaacactcacgaggccacctacatccagcggacctttgaggagttccaggaattacacaataagttgcggctgctcttcccttcttcccacttgcccagcttccctagtcgcttcgtgatcggccgctcccggggagaggcggtggccgagcggcggagggaggagctaaacggttacatctggcacttgatccacgcaccccctgaggtggccgagtgtgatttggtgtacaccttcttccacccactgccccgggatgagaaggctatgggcaccagcccagctcctaagtcctcagatggcacatgggcccggcccgtcggaaaggtgggaggggaggtgaagctgtccatctcctacaaaaacaataaactcttcatcatggtgatgcatattcggggcttgcaactgctccaggatggaaatgaccctgacccctatgtgaaaatttacctccttcctgaccctcagaaaaccactaagaggaaaaccaaagtggcccggaaaacctgcaatcctacctacaatgagatgttggtatatgatgggatccccaagggtgacctgcagcagcgggagctccagctgagcgtgctgagtgagcagggattctgggagaacgtcctcctcggtgaggtgaacatccgcctgcgagagctggacctggctcaggagaagaccggctggttcgccctgggatctcgaagtcatggcaccttgtgagcccagcagagccaccacccagcatcccaggctggtggcaggagctgggggagaggactctcccctgtgagactcctccttgtgaagggccagggccctgggcaggcctccagctcggtccaggtgattctggcctctgtggtaggaggcagggagagtaagacatgctctgctgtctcttcctctggagactgaacttgggttggttgtgatgagcagccccttggaggctgtgaggttgcagcaaagttttaagtttaccttgtgtcaagggagcaatgcttggtttggggagtgtgtggggtgggctgtatgaagtagcattttgggggtgggtgggtggatatcttaatttttatttttaaaaaatgaaatagtgatgttgtcctaactgggacaggaagccttgcgagaagggacgtacctatgccccagaaggcaagagaggaagactatttggactttttgtatgattaaggttcttattggacttttccctaggttttttttttttgttattgttgttgttgtttcgttttctagctataggaactatctggggaggggcccagtgggtcctcggccagagccctctctaaggacaggttggggagggttggggagggctgcctgtgctggactgaggcttgtgccactgggcctttctgattttgcctccaaaggagagcgctgtgatacctacatgtgtaaggaagggccttccgtattggggttctgccaaggacccgtattcagggacccatgctcttttggggggacttttcctcttgtcttccctactttattaggacttgccctgaataccattttctaccccttgcccctccattctcctggcccttctgggggtcagctggtctctatgaatatgctgggggtgcttccccataggtctctcccttcatttgtctctggtgggacaaaatactgactcagtccttagatgtagtttcacccaagagcatcttggccctgggaagaggtccctaggctgcagatgctactgactgcttgctaggtagcctctggaaagcattccccatccatcactccccacttctttctgctgtgctgcttccctcccaaactccatttctgtcaccctttttataagacttttcctcattctgtggggccataaacctatttagtctggagccaaagggatgccctatctgaaggaaaggggcatggggtgggggattccatcaaaactgttgttttttgccccatgatttttctttggtcagtaggaggctggattggagtggtgattattcccctggagctaagctcaggagcccgaagggagagactgagactgactcccttatctcttcatattctttattccctaccagatggatttttttttttttttttggagacggagtctcgccctgtcgccaggctggagtgtagtggcatgatctcgactcactgcaaaatctgcctcccgggttcaagcgattctcctacctcagcctcccgagtagctgggattacaggcatgtgccaccacgccaagctaatttttgtatttttagtagagacggggtttcaccatgttggccaggatggtctcgatctcttgacctcgtgatctgcctgccttggcctcccaaagtgctgggattacaggcgtgagccaccatgccccgccccagatggattttacatttgctcttttgtgtttcgctccaaagggttgtcttcctcgccaaaaggagggagggactttgaatttgatatgaatctttaaaaccagaattggctggatatttcccatgattgggaaaagagtgaaatgaggacattctgtaaactgtccctccctaattccaaggatcagaaactccccgttttgctgactcattccataactggagaaagaagctccattgaccgaagccacagggcagcatggaagtttaaattttctctaaaattaaaatgccaaggataaagctggctgcttccaggagggggaagaggagtggggagtgggcggtgaaacttttccagatgaacggaccataaatgtgttactggctttgtgcctgtagctcattttattatgacctatatgctcctgatttaaagagatctgtgtactgtttacttcccacttcccagaatcccttgtatctcctttctcgggaattgtattttctaataaatgacatttgagaaaaaaaaaaaaaaaaaaaaaa

SEQ ID NO: 2593 - protein, 1634 aa, Homo sapiens
MSSTQDNGEHWKSLESVGISRKELAMAEALQMEYDALSRLRHDKEENRAKQNADPSLISWDEPGVDFYSKPAGRRTDLKLLRGLSGSDPTLNYNSLSPQEGPPNHSTSQGPQPGSDPWPKGSLSGDYLYIFDGSDGGVSSSPGPGDIEGSCKKLSPPPLPPRASIWDTPPLPPRKGSPSSSKISQPSDINTFSLVEQLPGKLLEHRILEEEEVLGGGGQGRLLGSVDYDGINDAITRLNLKSTYDAEMLRDATRGWKEGRGPLDFSKDTSGKPVARSKTMPPQVPPRTYASRYGNRKNATPGKNRRISAAPVGSRPHTVANGHELFEVSEERDEEVAAFCHMLDILRSGSDIQDYFLTGYVWSAVTPSPEHLGDEVNLKVTVLCDRLQEALTFTCNCSSTVDLLIYQTLCYTHDDLRNVDVGDFVLKPCGLEEFLQNKHALGSHEYIQYCRKFDIDIRLQLMEQKVVRSDLARTVNDDQSPSTLNYLVHLQERPVKQTISRQALSLLFDTYHNEVDAFLLADGDFPLKADRVVQSVKAICNALAAVETPEITSALNQLPPCPSRMQPKIQKDPSVLAVRENREKVVEALTAAILDLVELYCNTFNADFQTAVPGSRKHDLVQEACHFARSLAFTVYATHRIPIIWATSYEDFYLSCSLSHGGKELCSPLQTRRAHFSKYLFHLIVWDQQICFPVQVNRLPRETLLCATLYALPIPPPGSSSEANKQRRVPEALGWVTTPLFNFRQVLTCGRKLLGLWPATQENPSARWSAPNFHQPDSVILQIDFPTSAFDIKFTSPPGDKFSPRYEFGSLREEDQRKLKDIMQKESLYWLTDADKKRLWEKRYYCHSEVSSLPLVLASAPSWEWACLPDIYVLLKQWTHMNHQDALGLLHATFPDQEVRRMAVQWIGSLSDAELLDYLPQLVQALKYECYLDSPLVRFLLKRAVSDLRVTHYFFWLLKDGLKDSQFSIRYQYLLAALLCCCGKGLREEFNRQCWLVNALAKLAQQVREAAPSARQGILRTGLEEVKQFFALNGSCRLPLSPSLLVKGIVPRDCSYFNSNAVPLKLSFQNVDPLGENIRVIFKCGDDLRQDMLTLQMIRIMSKIWVQEGLDMRMVIFRCFSTGRGRGMVEMIPNAETLRKIQVEHGVTGSFKDRPLADWLQKHNPGEDEYEKAVENFIYSCAGCCVATYVLGICDRHNDNIMLKTTGHMFHIDFGRFLGHAQMFGNIKRDRAPFVFTSDMAYVINGGDKPSSRFHDFVDLCCQAYNLIRKHTHLFLNLLGLMLSCGIPELSDLEDLKYVYDALRPQDTEANATTYFTRLIESSLGSVATKLNFFIHNLAQMKFTGSDDRLTLSFASRTHTLKSSGRISDVFLCRHEKIFHPNKGYIYVVKVMRENTHEATYIQRTFEEFQELHNKLRLLFPSSHLPSFPSRFVIGRSRGEAVAERRREELNGYIWHLIHAPPEVAECDLVYTFFHPLPRDEKAMGTSPAPKSSDGTWARPVGKVGGEVKLSISYKNNKLFIMVMHIRGLQLLQDGNDPDPYVKIYLLPDPQKTTKRKTKVARKTCNPTYNEMLVYDGIPKGDLQQRELQLSVLSEQGFWENVLLGEVNIRLRELDLAQEKTGWFALGSRSHGTL

SEQ ID NO: 2594 - DNA, 1504 bp, Homo sapiens
gggcctgcacgttgactgtgggaaactcggaaacaagctcacatcttcctgtgggaaaccttctagcaacaggatgactctgcagtggactgcagttgccaccttcctctatgcggaggtctttgttgtgttgcttctctgcattcccttcatttctcctaaaagatggcagaagattttcaagtcccggctggtggagttgttagtgtcctatggcaacaccttctttgtggttctcattgtcatccttgtgctgttggtcatcgatgccgtgcgcgaaattcggaagtatgatgatgtgacggaaaaggtgaacctccagaacaatcccggggccatggagcacttccacatgaagcttttccgtgcccagaggaatctctacattgctggcttttccttgctgctgtccttcctgcttagacgcctggtgactctcatttcgcagcaggccacgctgctggcctccaatgaagcctttaaaaagcaggcggagagtgctagtgaggcagccaagaagtacatggaggagaatgaccagctcaagaagggagctgctgttgacggaggcaagttggatgtcgggaatgctgaggtgaagttggaggaagagaacaggagcctgaaggctgacctgcagaagctaaaggacgagctggccagcactaagcaaaaactagagaaagctgaaaacgaggttctggccatgcggaagcagtctgagggcctcaccaaggagtacgaccgcttgctggaggagcacgcaaagctgcaggctgcagtagatggtcccatggacaagaaggaagagtaagggcctccttcctcccctgcctgcagctggcttccacctggcacgtgcctgctgcttcctgagagcccggcctctccctccagtacttctgtttgtgcccttctgcttcccccattcccttccacagctcatagctcgtcatctcggcccttgtccacactctccaagcacattacaggggacctgattgctacacgttcagaatgcgtttgctgtcatcctgcttgcctgccaggcctgcacagccttggcttcacgcctgagcgtggagagcacgagttagttgtagtccggcttgcggtggggctgacttcctgttggtttgagcccctttttgttttgccctctgggtgttttctttggtcccgcaggagggtgggtggagcaggtggactggagtttctcttgagggcaataaaagttgtatgatgtttgtatgtgttttgtatttctctggagtgcaatggtgcaatctcagctcactgcaacctctgcctcccaggttcaaaccattctcttgcctcagcctcctgagcagctgggattacaggcgctggccacacacccagctgattgttgtatttttagtagagctgggtttcaccatgttggccaggctggtctcgaactcctgacctcaggcaatccacccacctcagcctcccaacatgctgcaattacagatgtgag

SEQ ID NO: 2595 - protein, 246 aa, Homo sapiens
MSLQWTAVATFLYAEVFVVLLLCIPFISPKRWQKIFKSRLVELLVSYGNTFFVVLIVILVLLVIDAVREIRKYDDVTEKVNLQNNPGAMEHFHMKLFRAQRNLYIAGFSLLLSFLLRRLVTLISQQATLLASNEAFKKQAESASEAAKKYMEENDQLKKGAAVDGGKLDVGNAEVKLEEENRSLKADLQKLKDELASTKQKLEKAENQVLAMRKQSEGLTKEYDRLLEEHAKLQAAVDGPMDKKEE

SEQ ID NO: 2596 - DNA, 2446 bp, Homo sapiens
gggatttgcacggcagcagagtcaccgtggagaggccagggtatcacaaacttatggattttgacaagaaaggagggaaaggggagacggaggagggccggagaatgtccaaggccggcgggggccggagcagccacggcatccggagctcggggaccagctcgggggtcctgatggtgggccccaacttccgcgtcggcaagaagatcggctgcggcaacttcggggagctccgcctaggaaagaatctctatacaaatgaatacgtggctatcaaattggagccgatcaagtcccgggccccgcagctgcacctggagtaccggttctacaagcagctcagcgccacagagggcgtccctcaggtctactacttcggtccgtgcgggaattacaacgccatggtgctggagctgctggggcccagcctggaggacctgttcgacctgtgcgaccggaccttcacgctcaagacggtgctgatgatcgccatccagctgatcacgcgcatggagtatgtgcacaccaagagcctaatctaccgggacgtgaagcccgagaacttcctggtgggccgcccggggaccaagcggcagcatgccatccacatcatcgacttcgggctggccaaggagtacatcgaccccgagaccaagaagcacatcccgtaccgcgagcacaagagcctgacgggcacggcgcgctacatgagcatcaacacgcacctgggcaaggagcagagccgccgcgacgacctggaggcgctgggccacatgttcatgtacttcctgcgcggcagcctcccctggcaggggctcaaggccgacacgctcaaggagcggtaccagaagatcggggacaccaaacgcgccacgcccatcgaggtgctctgcgagaacttcccagaggagatggccacgtacctgcgctatgtgcggcgcctggacttcttcgagaagcccgactatgactacctgcggaagctcttcaccgacctcttcgaccgcagtggcttcgtgttcgactatgagtacgactgggccgggaagcccctgccgacccccatcggcaccgtccacaccgacctgccctcccagcctcagctccgggacaaaacccagccgcacagcaaaaaccaggcgttgaactccaccaacggggagctgaatgcggacgaccccacggccggccactccaacgccccgatcacagcgcctgcagaggtggaggtggccgatgaaaccaaatgctgctgtttcttcaagaggagaaagagaaaatcgctgcagcgacacaagtgaccctgggcgcgtgcagccccctgaatcttctccgtgcagccccttggggcgcgaccttgtgcgaggccctcggggcccacccacagcggcccagggccagaccctggctggaagccagaacgcagactgcaggggccgcgcctggctcaggcggccccacccccgggacgtggggtcacttccttcatgtaagactttggccgaaatttctacacctgtgtctagtcctcccctccaagagcattaactatttaaaacaaggaaaagaggaaaaaaaaaacagaggcccgccctaccccactcctgcccctccgtttctttgctgaagtgagtagtgtgatcctggaggccccccggcctggccccgccccgccagccgcccccgttagcgtcataaagtccagcttgtctccctcgatccaaaggccgttttctcgaggggagggcaggcccggcctggaggggtgctgtggagctgtcttgcccaggccctcctgggagggggacaggcattgttgccaggggtgaggccgtgccccaggcctccccgaaaccaaaggggaaggcaggggtggggccgtggctgaagccggctccccaaccaaaatgctgcaccaaagctcgggcgccgcgggcacggctgctgcagtctcttcccagcctggccctggcaaggggcgggtgggcgctgccaggcgggtgcttctcgacgcacttgctcccggaggctgcgccccggcgcctggaacccgaggtgggaggaccggttggtgtcaccctgctcggccctcagccctgccgcgtggggcgcgtgggcacggagcttcctgcctctgctccgacacccggcaagcagccggagacaaaacgccttaaagcccccggcccagccctgcaggtatattgcaggggcctgggggcggccctggactggcgggcggttccccagtggggtgccctggaggctgccgggcagagtggagcagcttggggccgtgcccagggcggtggctgtgagtctagtttttgctttaccaagtgtacagaaatggcatttacgtttctctgatgctcccttgaagccatagaatttaggggcttttttaaaaaaataaaagaaaaatgaaaccaaaaaaaaaaaaaaa

SEQ ID NO: 2597 - protein, 415 aa, Homo sapiens
MDFDKKGGKGETEEGRRMSKAGGGRSSHGIRSSGTSSGVLMVGPNFRVGKKIGCGNFGELRLGKNLYTNEYVAIKLEPIKSRAPQLHLEYRFYKQLSATEGVPQVYYFGPCGKYNAMVLELLGPSLEDLFDLCDRTFTLKTVLMIAIQLITRMEYVHTKSLIYRDVKPENFLVGRPGTKRQHAIHIIDFGLAKEYIDPETKKHIPYREHKSLTGTARYMSINTHLGKEQSRRDDLEALGHMFMYFLRGSLPWQGLKADTLKERYQKIGDTKRATPIEVLCENFPEEMATYLRYVRRLDFFEKPDYDYLRKLFTDLFDRSGFVFDYEYDWAGKPLPTPIGTVHTDLPSQPQLRDKTQPHSKNQALNSTNGELNADDPTAGHSNAPITAPAEVEVADETKCCCFFKRRKRKSLQRHK

SEQ ID NO: 2598 - DNA, 2178 bp, Homo sapiens
gctcagtagcgatagcagcggccgtggaggtggcgttggggactgttttctctcggaggccggagcggagccgcgtctgactgaggcgggcagcaagcggccccctcgctccctccctccctcctccgcgccctccccgccgccaccagccgtcaaacgccaaccgccgctcctggggaggagccgcggctcgcggggccggagccaggcctgcgtccggacatcagccggagccggagcgagagccggggcctcggcgtccccgccctctccccgcctcggccagcgtccgccgggcccccgcgcgtcgcgccatggactcggacgagggctacaactacgagttcgacgaggacgaggagtgcagtgaggaggacagcggcgccgaggaggaggaggacgaagacgacgacgagccggacgatgataccctggatctgggcgaggtggagctggtggagcccgggctgggcgtcggcggggagcgggacggactgctgtgcggggagacgggcggtggcggcggcagcgctctggggcccggcggtggcggcggcggcggcggcggcggtggtggtggcgggccggggcatgagcaggaggaggattaccgctacgaggtgctcacggccgagcagattctacaacacatggtggaatgtatccgggaggtcaacgaggtcatccagaatccagcaactatcacaagaatactccttagccacttcaattgggataaagagaagctaatggaaaggtactttgatggaaacctggagaagctctttgctgagtgtcatgtaattaatccaagtaaaaagtctcgaacacgccagatgaatacaaggtcatcagcacaggatatgccttgtcagatctgctacttgaactaccctaactcgtatttcactggccttgaatgtggacataagttttgtatgcagtgctggagtgaatatttaactaccaaaataatggaagaaggcatgggtcacactatttcgtgtcctgctcatggttgtgatatcttagtggatgacaacacagttatgcgcctgatcacagattcaaaagttaaattaaagtatcagcatttaataacaaatagctttgtagagtgcaatcgactgttaaagtggtgtcctgccccagattgccaccatgttgttaaagtccaatatcctgatgctaaacctgttcgctgcaaatgtgggcgccaattttgctttaactgtggagaaaattggcatgatcctgttaaatgtaagtggttaaagaaatggattaaaaagtgtgatgatgacagtgaaacctccaattggattgcagccaacacaaaggaatgtcccaaatgccatgtcacaattgagaaggatggtggttgtaatcacatggtctgtcgtaaccagaattgtaaagcagagttttgctgggtgtgtcttggcccatgggaaccacatggatctgcctggtacaactgtaaccgctataatgaggatgatgcaaaggcagcaagagatgcacaggagcgatctagggcagccctgcagaggtacctgttctactgtaatcgctatatgaaccacatgcagagcctgcgctttgagcacaaactatatgctcaggtgaaacagaaaatggaggagatgcagcagcacaacatgtcctggattgaggtgcagttcctgaagaaggcagttgatgtcctctgccagtgtcgtgccacactcatgtacacttatgtcttcgctttctacctcaaaaagaataaccagtccattatctttgagaataaccaagcagatctagagaatgccacagaggtgctctcgggctaccttgaacgagatatttcccaagattctctgcaggatataaagcagaaagtacaagacaagtacagatactgtgagagtcgacgaagggttttgttacagcatgtgcatgaaggctatgaaaaagatctgtgggagtacattgaggactgagaatggccctgcataaaatgaactctgaaaactttaccatctagagtgctcatgcaattaaaacaaaacaaacacaaacaaggaggcactaagcctattctgacaccactggtctgtagtaccagaattgttttgttaatggaaagtttaagtaaattatattgtaataaaaaggtagataaaccattgt

SEQ ID NO: 2599 - protein, 557 aa, Homo sapiens
MDSDEGYNYEFDEDEECSEEDSGAEEEEDEDDDEPDDDTLDLGEVELVEPGLGVGGERDGLLCGETGGGGGSALGPGGGGGGGGGGGGGGPGHEQEEDYRYEVLTAEQILQHMVECIREVNEVIQNPATITRILLSHFNWDKEKLMERYFDGNLEKLFAECHVINPSKKSRTRQMNTRSSAQDMPCQICYLNYPNSYFTGLECGHKFCMQCWSEYLTTKIMEEGMGHTISCPAHGCDILVDDNTVMRLITDSKVKLKYQHLITNSFVECNRLLKWCPAPDCHHVVKVQYPDAKPVRCKCGRQFCFNCGENWHDPVKCKWLKKWIKKCDDDSETSNWIAANTKECPKCHVTIEKDGGCNHMVCRNQNCKAEFCWVCLGPWEPHGSAWYNCNRYNEDDAKAARDAQERSRAALQRYLFYCNRYMNHMQSLRFEHKLYAQVKQKMEEMQQHNMSWIEVQFLKKAVDVLCQCRATLMYTYVFAFYLKKNNQSIIFENNQADLENATEVLSGYLERDISQDSLQDIKQKVQDKYRYCESRRRVLLQHVHEGYEKDLWEYIED

SEQ ID NO: 2600 - DNA, 3698 bp, Homo sapiens
gcaagatggacgcgggatttttccgcggaacaagtgcagaacaggataatcggttcagcaacaaacagaagaaactactgaagcagctgaaatttgcagaatgcctagaaaaaaaggtggacatgagcaaagtaaatttggaggttataaagccttggataacaaaaagagtaacggaaatccttgggtttgaagatgatgttgtgattgagtttatattcaaccagctggaagtgaagaatccagactccaaaatgatgcaaatcaacctgactggatttttgaatggaaaaaatgctcgagaatttatgggagaactgtggcccctgctgctaagtgcacaagaaaacatcgcgggaatcccttctgctttcctagaactgaagaaagaagaaataaaacaaagacagattgaacaagaaaaactggcatctatgaaaaagcaagatgaagacaaagataaaagagataaggaagaaaaagaaagcagcagagaaaaaagggagcggtctcgtagcccaagaagacgcaaatccagatctccttcccctagaagacgatcttcccctgtcaggagagagagaaagcgcagtcattctcgatctccccgtcacagaaccaagagccggagtccttcccctgctccagaaaagaaggaaaaaactccagagctcccagaaccttcagtgaaagtaaaagaaccttcagtacaagaggctacttctactagtgacattctgaaagttcccaaacctgaacctataccagagcctaaagaaccttctccggaaaaaaattccaaaaaagaacaggagaaggagaagacccgaccacgatctcggtcacgctccaaatcaagatcccggacgcggtcccgctctccttctcacactcgacctagacggcgccatagatccgataagatgtattcacctagaaggcggccaagcccaagaaggcggccatctcctcgaagaagaactccgccaagaagaatgcctcctccaccaaggcatagaaggagtagatctccagtaagacgaagaagacgttcgtcagcatccttgtctgggagtagctcatcatcctcttcatctcgttcacggtcaccaccaaagaagcctcccaagaggacatccagcccccctcggaaaactcgtaggttatctccttcagcaagtcctccaaggcgaaggcacaggccatcacctcctgcaacaccacccaaaactcgggattcccctacaccccagcagtcaaaccgtacaagaaaaagtcgtgtttctgtgtctccagggagaacttcaggtaaagtgacaaaacataaaggtactgagaaaagagaatccccttcaccagcaccgaagcctagaaaagtagagttatctgaatcggaagaagataaaggtggcaaaatggctgcagcagattctgtgcagcagagacgccaatacagacgacaaaaccagcagtcttcatctgactctggctcctcctcctcctcagaagatgaacgacccaagagatcccatgtgaagaatggtgaggttggcaggcggcggagacattccccttcccggagtgcttctccatcaccacgaaagcgccaaaaagagacttcccctcgtggtagacggaggagaagtccatccccaccacccaccagaaggcgacggtctccttctcccgcccctcctcctcgacggcgcaggactcccacaccaccaccacgacgaaggactccttctcctcccccacgtcggcgctcaccttctcctagaagatactctcctccaatacagaggagatactctccttctccacctccaaagagaagaacggcttcacctcctccccctcctaaacgaagagcatcaccatctccaccaccaaagcggcgggtctcccattctccacctcccaaacaaagaagctccccagtcaccaagagacgttcaccttcattatcatccaagcataggaaagggtcttccccaagccgctctacccgggaggcccgatcaccacaaccaaacaaacggcattcgccctcaccacggcctcgagctcctcagacctcctcaagtcctccacccgttcgaagaggagcgtcgtcatcaccccaaagaaggcagtccccgtctccaagtactaggcccattaggagagtctccaggactccggaacctaaaaagataaaaaaggctgcttccccaagcccacagtctgtaagaagggtctcatcctcccgatctgtctccgggtctcctgagccagcagctaaaaagcccccagcacctccatcccccgtccagtctcagtcaccgtctacaaactggtcaccagctgtaccggtcaaaaaggccaaaaagcccaacaccgagcccatcaccgccaagaaattcagatcaggaaggaggtggaaagaaaaagaagaaaaagaaggacaagaaacacaaaaaggataagaagcacaagaagcacaaaaaacacaagaaggaaaaggctgtggctgcagctgctgcagctgctgtgacccctgcagccattgcagctgccacaaccacattagcacaggaagagccagtggcagcgccagagccgaagaaggagactgaaagtgaagctgaagataaccttgatgatttagaaaagcacctgcgtgaaaaggccctgagatcaatgaggaaggcccaagtgtccccacagtcttagggggaaatgtttgttatgatgtaaattttatttggtttgtacgcagttcaatttcaaaattgctaaaatgtgtttgagctttagactataacatttgttgtaataattgctaggttgaagttcaacatgtaaaaaaagggggcatggatttacattgcaaaaggtgtccacagtgtattagtgacattctttcattgacagctgacataattcattgagtgaaatattttaagccaaaaaaaaattccctttttaaaaaagggggtttaaatactgttggcatttttatggttcctttaaatgccctagaattcccagaggggttttttgtttgtttttttggttttgattttctttttgtttttctttcttcttcttatttttttcatttgagtcttagctcccatttaagttatgcttctgaccttgtatggtctgtaagcttgcccagaaataagaccactgttttgaactaccacaaaagtataaatgaatattttaatgccacaatctttcctgttgcctgtggagtctctgctgaaatgaatcaggattcgagctctaggatgagacagaaaatgaaagcatgttgtttgccaggacactgtgggtttatattgatgtgtaacaagttgatttggaacactggactctcattctgttattctggcttcgccccttttgttccccctccttcttttgtaaaggcaatgagctagtcccagaaaggatccttcagttacatacaatttatttaatgaaatgtcatggctctgttcatatttttgtcttgttcttccaattggtatatacaactttcagagcctcttgtatttggaaggctggaagggcccagactttggaatagtgtcttggtttcactgtttttgttttgattttttttttgttttgattttttttaaactaaagctatataaagcttgtggattaaacagaataaatttctaaatttaaaaaaaaaa

SEQ ID NO: 2601 - protein, 820 aa, Homo sapiens
MDAGFFRGTSAEQDNRFSNKQKKLLKQLKFAECLEKKVDMSKVNLEVIKPWITKRVTEILGFEDDVVIEFIFNQLEVKNPDSKMMQINLTGFLNGKNAREFMGELWPLLLSAQENIAGIPSAFLELKKEEIKQRQIEQEKLASMKKQDEDKDKRDKEEKESSREKRERSRSPRRRKSRSPSPRRRSSPVRRERKRSHSRSPRHRTKSRSPSPAPEKKEKTPELPEPSVKVKEPSVQEATSTSDILKVPKPEPIPEPKEPSPEKNSKKEQEKEKTRPRSRSRSKSRSRTRSRSPSHTRPRRRHRSDKMYSPRRRPSPRRRPSPRRRTPPRRMPPPPRHRRSRSPVRRRRRSSASLSGSSSSSSSSRSRSPPKKPPKRTSSPPRKTRRLSPSASPPRRRHRPSPPATPPKTRDSPTPQQSNRTRKSRVSVSPGRTSGKVTKHKGTEKRESPSPAPKPRKVELSESEEDKGGKMAAADSVQQRRQYRRQNQQSSSDSGSSSSSEDERPKRSHVKNGEVGRRRRHSPSRSASPSPRKRQKETSPRGRRRRSPSPPPTRRRRSPSPAPPPRRRRTPTPPPRRRTPSPPPRRRSPSPRRYSPPIQRRYSPSPPPKRRTASPPPPPKRRASPSPPPKRRVSHSPPPKQRSSPVTKRRSPSLSSKHRKGSSPSRSTREARSPQPNKRHSPSPRPRAPQTSSSPPPVRRGASSSPQRRQSPSPSTRPIRRVSRTPEPKKIKKAASPSPQSVRRVSSSRSVSGSPEPAAKKPPAPPSPVQSQSPSTNWSPAVPVKKAKKPNTEPITAKKFRSGRRWKEKEEKEGQETQKG

SEQ ID NO: 2602 - DNA, 2845 bp, Homo sapiens
cctgcctgcccgcctgcttgctctctggctgtgctcctgcttaaagaaatcagtccttcctttccgacttagtcctcgggaagaagtttcagactacaaggtatcattggaacatttcaagatcatcaaatcaaattccacagggattggtgaccaaccagaaggctcagacatctgattgctgacctgtccagacatcatctggtctccctgaacctgaaatcacaccatggatgattttgagcgtcgcagagaacttagaaggcaaaagagggaggagatgcgactcgaagcagaaagaatcgcctaccagaggaatgacgatgatgaagaggaggcagcccgggaacgccgccgccgagcccgacaggaacggctgcggcagaagcaggaggaagaatccttgggacaggtgaccgaccaggtggaggtgaatgcccagaacagtgtgcctgacgaggaggccaagacaaccaccacaaacactcaagtggaaggggatgatgaggccgcattcctggagcgcctggctcggcgtgaggaaagacgccaaaaacgccttcaggaggctctggagcggcagaaggagttcgacccaacaataacagatgcaagtctgtcgctcccaagcagaagaatgcaaaatgacacagcagaaaatgaaactaccgagaaggaagaaaaaagtgaaagtcgccaagaaagatacgagatagaggaaacagaaacagtcaccaagtcctaccagaagaatgattggagggatgctgaagaaaacaagaaagaagacaaggaaaaggaggaggaggaagaggagaagccaaagcgagggagcattggagaaaatcagatcaaagatgaaaagattaaaaaggacaaagaacccaaagaagaagttaagagcttcatggatcgaaagaagggatttacagaagttaagtcgcagaatggagaattcatgacccacaaacttaaacatactgagaatactttcagccgccctggagggagggccagcgtggacaccaaggaggctgagggcgccccccaggtggaagccggcaaaaggctggaggagcttcgtcgtcgtcgcggggagaccgagagcgaagagttcgagaagctcaaacagaagcagcaggaggcggctttggagctggaggaactcaagaaaaagagggaggagagaaggaaggtcctggaggaggaagagcagaggaggaagcaggaggaagccgatcgaaaactcagagaggaggaagagaagaggaggctaaaggaagagattgaaaggcgaagagcagaagctgctgagaaacgccagaagatgccagaagatggcttgtcagatgacaagaaaccattcaagtgtttcactcctaaaggttcatctctcaagatagaagagcgagcagaatttttgaataagtctgtgcagaaaagcagtggtgtcaaatcgacccatcaagcagcaatagtctccaagattgacagcagactggagcagtataccagtgcaattgagggaacaaaaagcgcaaaacctacaaagccggcagcctcggatcttcctgttcctgctgaaggtgtacgcaacatcaagagtatgtgggagaaagggaatgtgttttcatcccccactgcagcaggcacaccaaataaggaaactgctggcttgaaggtaggggtttctagccgcatcaatgaatggctaactaaaaccccagatggaaacaagtcacctgctcccaaaccttctgacttgagaccaggagacgtatccagcaagcggaacctctgggaaaagcaatctgtggataaggtcacttcccccactaaggtttgagacagttccagaaagaacccaagctcaagacgcaggacgagctcagttgtagagggctaattcgctctgttttgtatttatgttgatttactaaattgggttcattatcttttatttttcaatatcccagtaaacccatgtatattatcactatatttaataatcacagtctagagatgttcatggtaaaagtactgcctttgcacaggatcctgtttctaaagaaacccatgctgtgaaatagagacttttctactgatcatcataactctgtatctgagcagtgataccaaccacatctgaagtcaacagaagatccaagtttaaaattgctgcggaatgtgtgcagtatctagaaaaatgaaccgtagtttttgtttttttaaatacagaagtcatgttgtttctgcactttataataaagcatggaagaaattatcttagtaggcaattgtaacactttttgaaagtaacccatttcagatttgaaatactgcaataatggttgtctttaaaaaaaaaaagaatgtactgttaaggtattactttttttcatgctgatgattcatatctaaattacattattatgttagctgacagtggtactgattttttaggttggttgttttgtggatttctttagtagtgatagtagcctgaaccacattttagataactcaattatgtatgtatgtgcatacacatatacaaacacactaatggtagaatgcttttttatgtgctagactattatatttagtagtatgtcattgtaactagccaatatcacagcttttgaaaaattaaaaaatcatcatcactataatatttcatatttgccaacagaaacatggcagataggtatcaatatgttttcaatgcctgatgacctataagaagaaagtattgaaaagaagagagattagaactgttagaaggagttgaaattttctaaaagacatagtatttagtttataattaaatgcattcttgaagtcc

SEQ ID NO: 2603 - protein, 538 aa, Homo sapiens
MDDFERRRELRRQKREEMRLEAERIAYQRNDDDEEEAARERRRRARQERLRQKQEEESLGQVTDQVEVNAQNSVPDEEAKTTTTNTQVEGDDEAAFLERLARREERRQKRLQEALERQKEFDPTITDASLSLPSRRMQNDTAENETTEKEEKSESRQERYEIEETETVTKSYQKNDWRDAEENKKEDKEKEEEEEEKPKRGSIGENQIKDEKIKKDKEPKEEVKSFMDRKKGFTEVKSQNGEFMTHKLKHTENTFSRPGGRASVDTKEAEGAPQVEAGKRLEELRRRRGETESEEFEKLKQKQQEAALELEELKKKREERRKVLEEEEQRRKQEEADRKLREEEEKRRLKEEIERRRAEAAEKRQKMPEDGLSDDKKPFKCFTPKGSSLKIEERAEFLNKSVQKSSGVKSTHQAAIVSKIDSRLEQYTSAIEGTKSAKPTKPAASDLPVPAEGVRNIKSMWEKGNVFSSPTAAGTPNKETAGLKVGVSSRINEWLTKTPDGNKSPAPKPSDLRPGDVSSKRNLWEKQSVDKVTSPTKV

SEQ ID NO: 2604 - DNA, 3610 bp, Homo sapiens
cctgcctgcccgcctgcttgctctctggctgtgctcctgcttaaagaaatcagtccttcctttccgacttagtcctcgggaagaagtttcagactacaaggtatcattggaacatttcaagatcatcaaatcaaattccacagggattggtgaccaaccagaaggctcagacatctgattgctgacctgtccagacatcatctggtctccctgaacctgaaatcacaccatggatgattttgagcgtcgcagagaacttagaaggcaaaagagggaggagatgcgactcgaagcagaaagaatcgcctaccagaggaatgacgatgatgaagaggaggcagcccgggaacgccgccgccgagcccgacaggaacggctgcggcagaagcaggaggaagaatccttgggacaggtgaccgaccaggtggaggtgaatgcccagaacagtgtgcctgacgaggaggccaagacaaccaccacaaacactcaagtggaaggggatgatgaggccgcattcctggagcgcctggctcggcgtgaggaaagacgccaaaaacgccttcaggaggctctggagcggcagaaggagttcgacccaacaataacagatgcaagtctgtcgctcccaagcagaagaatgcaaaatgacacagcagaaaatgaaactaccgagaaggaagaaaaaagtgaaagtcgccaagaaagatacgagatagaggaaacagaaacagtcaccaagtcctaccagaagaatgattggagggatgctgaagaaaacaagaaagaagacaaggaaaaggaggaggaggaagaggagaagccaaagcgagggagcattggagaaaatcaggtagaggtgatggtggaagagaaaacaactgaaagccaggaggaaacagtggtaatgtcattaaaaaatgggcagatcagttcagaagagcctaaacaagaggaggagagggaacaaggttcagatgagatttcccatcatgaaaagatggaagaggaagacaaggaaagagctgaggcagagagggcaaggttggaagcagaagaaagagaaagaattaaagccgagcaagacaaaaagatagcagatgaacgagcaagaattgaagcagaagaaaaagcagctgcccaagaaagagaaaggagagaggcagaagagagggaaaggatgagggaggaagagaaaagggcagcagaggagaggcagaggataaaggaggaagagaaaagggcagcagaggagaggcagaggataaaggaggaagagaaaagggcagcagaggagaggcagaggataaaagaggaagagaaaagggcagcagaggagaggcaaagggccagggcagaggaggaagagaaggctaaggtagaagagcagaaacgtaacaagcagctagaagagaaaaaacgtgccatgcaagagacaaagataaaaggggaaaaggtagaacagaaaatagaagggaaatgggtaaatgaaaagaaagcacaagaagataaacttcagacagctgtcctaaagaaacagggagaagagaagggaactaaagtgcaagctaaaagagaaaagctccaagaagacaagcctaccttcaaaaaagaagagatcaaagatgaaaagattaaaaaggacaaagaacccaaagaagaagttaagagcttcatggatcgaaagaagggatttacagaagttaagtcgcagaatggagaattcatgacccacaaacttaaacatactgagaatactttcagccgccctggagggagggccagcgtggacaccaaggaggctgagggcgccccccaggtggaagccggcaaaaggctggaggagcttcgtcgtcgtcgcggggagaccgagagcgaagagttcgagaagctcaaacagaagcagcaggaggcggctttggagctggaggaactcaagaaaaagagggaggagagaaggaaggtcctggaggaggaagagcagaggaggaagcaggaggaagccgatcgaaaactcagagaggaggaagagaagaggaggctaaaggaagagattgaaaggcgaagagcagaagctgctgagaaacgccagaagatgccagaagatggcttgtcagatgacaagaaaccattcaagtgtttcactcctaaaggttcatctctcaagatagaagagcgagcagaatttttgaataagtctgtgcagaaaagcagtggtgtcaaatcgacccatcaagcagcaatagtctccaagattgacagcagactggagcagtataccagtgcaattgagggaacaaaaagcgcaaaacctacaaagccggcagcctcggatcttcctgttcctgctgaaggtgtacgcaacatcaagagtatgtgggagaaagggaatgtgttttcatcccccactgcagcaggcacaccaaataaggaaactgctggcttgaaggtaggggtttctagccgcatcaatgaatggctaactaaaaccccagatggaaacaagtcacctgctcccaaaccttctgacttgagaccaggagacgtatccagcaagcggaacctctgggaaaagcaatctgtggataaggtcacttcccccactaaggtttgagacagttccagaaagaacccaagctcaagacgcaggacgagctcagttgtagagggctaattcgctctgttttgtatttatgttgatttactaaattgggttcattatcttttatttttcaatatcccagtaaacccatgtatattatcactatatttaataatcacagtctagagatgttcatggtaaaagtactgcctttgcacaggatcctgtttctaaagaaacccatgctgtgaaatagagacttttctactgatcatcataactctgtatctgagcagtgataccaaccacatctgaagtcaacagaagatccaagtttaaaattgctgcggaatgtgtgcagtatctagaaaaatgaaccgtagtttttgtttttttaaatacagaagtcatgttgtttctgcactttataataaagcatggaagaaattatcttagtaggcaattgtaacactttttgaaagtaacccatttcagatttgaaatactgcaataatggttgtctttaaaaaaaaaaagaatgtactgttaaggtattactttttttcatgctgatgattcatatctaaattacattattatgttagctgacagtggtactgattttttaggttggttgttttgtggatttctttagtagtgatagtagcctgaaccacattttagataactcaattatgtatgtatgtgcatacacatatacaaacacactaatggtagaatgcttttttatgtgctagactattatatttagtagtatgtcattgtaactagccaatatcacagcttttgaaaaattaaaaaatcatcatcactataatatttcatatttgccaacagaaacatggcagataggtatcaatatgttttcaatgcctgatgacctataagaagaaagtattgaaaagaagagagattagaactgttagaaggagttgaaattttctaaaagacatagtatttagtttataattaaatgcattcttgaagtcc

SEQ ID NO: 2605 - protein, 793 aa, Homo sapiens
MDDFERRRELRRQKREEMRLEAERIAYQRNDDDEEEAARERRRRARQERLRQKQEEESLGQVTDQVEVNAQNSVPDEEAKTTTTNTQVEGDDEAAFLERLARREERRQKRLQEALERQKEFDPTITDASLSLPSRRMQNDTAENETTEKEEKSESRQERYEIEETETVTKSYQKNDWRDAEENKKEDKEKEEEEEEKPKRGSIGENQVEVMVEEKTTESQEETVVMSLKNGQISSEEPKQEEEREQGSDEISHHEKMEEEDKERAEAERARLEAEERERIKAEQDKKIADERARIEAEEKAAAQERERREAEERERMREEEKRAAEERQRIKEEEKRAAEERQRIKEEEKRAAEERQRIKEEEKRAAEERQRARAEEEEKAKVEEQKRNKQLEEKKRAMQETKIKGEKVEQKIEGKWVNEKKAQEDKLQTAVLKKQGEEKGTKVQAKREKLQEDKPTFKKEEIKDEKIKKDKEPKEEVKSFMDRKKGFTEVKSQNGEFMTHKLKHTENTFSRPGGRASVDTKEAEGAPQVEAGKRLEELRRRRGETESEEFEKLKQKQQEAALELEELKKKREERRKVLEEEEQRRKQEEADRKLREEEEKRRLKEEIERRRAEAAEKRQKMPEDGLSDDKKPFKCFTPKGSSLKIEERAEFLNKSVQKSSGVKSTHQAAIVSKIDSRLEQYTSAIEGTKSAKPTKPAASDLPVPAEGVRNIKSMWEKGNVFSSPTAAGTPNKETAGLKVGVSSRINEWLTKTPDGNKSPAPKPSDLRPGDVSSKRNLWEKQSVDKVTSPTKV

SEQ ID NO: 2606 - DNA, 2198 bp, Homo sapiens
caactgcggacatgctgggtggatccggatcgcatggaagacgcagcctggccgcgctctcccaaatcgcctaccagaggaatgacgatgatgaagaggaggcagcccgggaacggcgccgccgagcccgacaggaacggctgcggcagaagcaggaggaagaatccttgggacaggtgaccgaccaggtggaggtgaatgcccagaacagtgtgcctgacgaggaggccaagacaaccaccacaaacactcaagtggaaggggatgatgaggccgcattcctggagcgcctggctcggcgtgaggaaagacgccaaaaacgccttcaggaggctctggagcggcagaaggagttcgacccaacaataacagatgcaagtctgtcgctcccaagcagaagaatgcaaaatgacacagcagaaaatgaaactaccgagaaggaagaaaaaagtgaaagtcgccaagaaagatacgagatagaggaaacagaaacagtcaccaagtcctaccagaagaatgattggagggatgctgaagaaaacaagaaagaagacaaggaaaaggaggaggaggaagaggagaagccaaagcgagggagcattggagaaaatcagggagaagagaagggaactaaagtgcaagctaaaagagaaaagctccaagaagacaagcctaccttcaaaaaagaagagatcaaagatgaaaagattaaaaaggacaaagaacccaaagaagaagttaagagcttcatggatcgaaagaagggatttacagaagttaagtcgcagaatggagaattcatgacccacaaacttaaacatactgagaatactttcagccgccctggagggagggccagcgtggacaccaaggaggctgagggcgccccccaggtggaagccggcaaaaggctggaggagcttcgtcgtcgtcgcggggagaccgagagcgaagagttcgagaagctcaaacagaagcagcaggaggcggctttggagctggaggaactcaagaaaaagagggaggagagaaggaaggtcctggaggaggaagagcagaggaggaagcaggaggaagccgatcgaaaactcagagaggaggaagagaagaggaggctaaaggaagagattgaaaggcgaagagcagaagctgctgagaaacgccagaagatgccagaagatggcttgtcagatgacaagaaaccattcaagtgtttcactcctaaaggttcatctctcaagatagaagagcgagcagaatttttgaataagtctgtgcagaaaagcagtggtgtcaaatcgacccatcaagcagcaatagtctccaagattgacagcagactggagcagtataccagtgcaattgagggaacaaaaagcgcaaaacctacaaagccggcagcctcggatcttcctgttcctgctgaaggtgtacgcaacatcaagagtatgtgggagaaagggaatgtgttttcatcccccactgcagcaggcacaccaaataaggaaactgctggcttgaaggtaggggtttctagccgtatcaatgaatggctaactaaaaccccagatggaaacaagtcacctgctcccaaaccttctgacttgagaccaggagacgtatccagcaagcggaacctctgggaaaagcaatctgtggataaggtcacttcccccactaaggtttgagacagttccagaaagaacccaagctcaagacgcaggacgagctcagttgtagagggctaattcgctcttttgtatttatgttgatttactaaattgggttcattatcttttatttttcaatatcccagtaaacccatgtatattatcactatatttaataatcacagctagagatgttcatggtaaaagtactgcctttgcacaggagcctgtttctaaagaaacccatgctgtgaaatagagacttttctactgatcatcataactctgtatctgagcagtgataccaaccacatctgaagtcaacagaagatccaagtttaaaattgcctgcggaatgtgtgcagtatctagaaaaatgaaccgtagttttgtttttttaaatacagaagtcatgttgtttctgcactttataataaagcatggaagaaattatcttagtaggcaattgtaacactttttgaaagtaacccatttcagatttgaaatactgcaataatggttgtcttt

SEQ ID NO: 2607 - protein, 558 aa, Homo sapiens
MLGGSGSHGRRSLAALSQIAYQRNDDDEEEAARERRRRARQERLRQKQEEESLGQVTDQVEVNAQNSVPDEEAKTTTTNTQVEGDDEAAFLERLARREERRQKRLQEALERQKEFDPTITDASLSLPSRRMQNDTAENETTEKEEKSESRQERYEIEETETVTKSYQKNDWRDAEENKKEDKEKEEEEEEKPKRGSIGENQGEEKGTKVQAKREKLQEDKPTFKKEEIKDEKIKKDKEPKEEVKSFMDRKKGFTEVKSQNGEFMTHKLKHTENTFSRPGGRASVDTKEAEGAPQVEAGKRLEELRRRRGETESEEFEKLKQKQQEAALELEELKKKREERRKVLEEEEQRRKQEEADRKLREEEEKRRLKEEIERRRAEAAEKRQKMPEDGLSDDKKPFKCFTPKGSSLKIEERAEFLNKSVQKSSGVKSTHQAAIVSKIDSRLEQYTSAIEGTKSAKPTKPAASDLPVPAEGVRNIKSMWEKGNVFSSPTAAGTPNKETAGLKVGVSSRINEWLTKTPDGNKSPAPKPSDLRPGDVSSKRNLWEKQSVDKVTSPTKV

SEQ ID NO: 2608 - DNA, 2120 bp, Homo sapiens
caactgcggacatgctgggtggatccggatcgcatggaagacgcagcctggccgcgctctcccaaatcgcctaccagaggaatgacgatgatgaagaggaggcagcccgggaacggcgccgccgagcccgacaggaacggctgcggcagaagcaggaggaagaatccttgggacaggtgaccgaccaggtggaggtgaatgcccagaacagtgtgcctgacgaggaggccaagacaaccaccacaaacactcaagtggaaggggatgatgaggccgcattcctggagcgcctggctcggcgtgaggaaagacgccaaaaacgccttcaggaggctctggagcggcagaaggagttcgacccaacaataacagatgcaagtctgtcgctcccaagcagaagaatgcaaaatgacacagcagaaaatgaaactaccgagaaggaagaaaaaagtgaaagtcgccaagaaagatacgagatagaggaaacagaaacagtcaccaagtcctaccagaagaatgattggagggatgctgaagaaaacaagaaagaagacaaggaaaaggaggaggaggaagaggagaagccaaagcgagggagcattggagaaaatcagatcaaagatgaaaagattaaaaaggacaaagaacccaaagaagaagttaagagcttcatggatcgaaagaagggatttacagaagttaagtcgcagaatggagaattcatgacccacaaacttaaacatactgagaatactttcagccgccctggagggagggccagcgtggacaccaaggaggctgagggcgccccccaggtggaagccggcaaaaggctggaggagcttcgtcgtcgtcgcggggagaccgagagcgaagagttcgagaagctcaaacagaagcagcaggaggcggctttggagctggaggaactcaagaaaaagagggaggagagaaggaaggtcctggaggaggaagagcagaggaggaagcaggaggaagccgatcgaaaactcagagaggaggaagagaagaggaggctaaaggaagagattgaaaggcgaagagcagaagctgctgagaaacgccagaagatgccagaagatggcttgtcagatgacaagaaaccattcaagtgtttcactcctaaaggttcatctctcaagatagaagagcgagcagaatttttgaataagtctgtgcagaaaagcagtggtgtcaaatcgacccatcaagcagcaatagtctccaagattgacagcagactggagcagtataccagtgcaattgagggaacaaaaagcgcaaaacctacaaagccggcagcctcggatcttcctgttcctgctgaaggtgtacgcaacatcaagagtatgtgggagaaagggaatgtgttttcatcccccactgcagcaggcacaccaaataaggaaactgctggcttgaaggtaggggtttctagccgtatcaatgaatggctaactaaaaccccagatggaaacaagtcacctgctcccaaaccttctgacttgagaccaggagacgtatccagcaagcggaacctctgggaaaagcaatctgtggataaggtcacttcccccactaaggtttgagacagttccagaaagaacccaagctcaagacgcaggacgagctcagttgtagagggctaattcgctcttttgtatttatgttgatttactaaattgggttcattatcttttatttttcaatatcccagtaaacccatgtatattatcactatatttaataatcacagctagagatgttcatggtaaaagtactgcctttgcacaggagcctgtttctaaagaaacccatgctgtgaaatagagacttttctactgatcatcataactctgtatctgagcagtgataccaaccacatctgaagtcaacagaagatccaagtttaaaattgcctgcggaatgtgtgcagtatctagaaaaatgaaccgtagttttgtttttttaaatacagaagtcatgttgtttctgcactttataataaagcatggaagaaattatcttagtaggcaattgtaacactttttgaaagtaacccatttcagatttgaaatactgcaataatggttgtcttt

SEQ ID NO: 2609 - protein, 532 aa, Homo sapiens
MLGGSGSHGRRSLAALSQIAYQRNDDDEEEAARERRRRARQERLRQKQEEESLGQVTDQVEVNAQNSVPDEEAKTTTTNTQVEGDDEAAFLERLARREERRQKRLQEALERQKEFDPTITDASLSLPSRRMQNDTAENETTEKEEKSESRQERYEIEETETVTKSYQKNDWRDAEENKKEDKEKEEEEEEKPKRGSIGENQIKDEKIKKDKEPKEEVKSFMDRKKGFTEVKSQNGEFMTHKLKHTENTFSRPGGRASVDTKEAEGAPQVEAGKRLEELRRRRGETESEEFEKLKQKQQEAALELEELKKKREERRKVLEEEEQRRKQEEADRKLREEEEKRRLKEEIERRRAEAAEKRQKMPEDGLSDDKKPFKCFTPKGSSLKIEERAEFLNKSVQKSSGVKSTHQAAIVSKIDSRLEQYTSAIEGTKSAKPTKPAASDLPVPAEGVRNIKSMWEKGNVFSSPTAAGTPNKETAGLKVGVSSRINEWLTKTPDGNKSPAPKPSDLRPGDVSSKRNLWEKQSVDKVTSPTKV

SEQ ID NO: 2610 - DNA, 2923 bp, Homo sapiens
cctgcctgcccgcctgcttgctctctggctgtgctcctgcttaaagaaatcagtccttcctttccgacttagtcctcgggaagaagtttcagactacaaggtatcattggaacatttcaagatcatcaaatcaaattccacagggattggtgaccaaccagaaggctcagacatctgattgctgacctgtccagacatcatctggtctccctgaacctgaaatcacaccatggatgattttgagcgtcgcagagaacttagaaggcaaaagagggaggagatgcgactcgaagcagaaagaatcgcctaccagaggaatgacgatgatgaagaggaggcagcccgggaacgccgccgccgagcccgacaggaacggctgcggcagaagcaggaggaagaatccttgggacaggtgaccgaccaggtggaggtgaatgcccagaacagtgtgcctgacgaggaggccaagacaaccaccacaaacactcaagtggaaggggatgatgaggccgcattcctggagcgcctggctcggcgtgaggaaagacgccaaaaacgccttcaggaggctctggagcggcagaaggagttcgacccaacaataacagatgcaagtctgtcgctcccaagcagaagaatgcaaaatgacacagcagaaaatgaaactaccgagaaggaagaaaaaagtgaaagtcgccaagaaagatacgagatagaggaaacagaaacagtcaccaagtcctaccagaagaatgattggagggatgctgaagaaaacaagaaagaagacaaggaaaaggaggaggaggaagaggagaagccaaagcgagggagcattggagaaaatcagggagaagagaagggaactaaagtgcaagctaaaagagaaaagctccaagaagacaagcctaccttcaaaaaagaagagatcaaagatgaaaagattaaaaaggacaaagaacccaaagaagaagttaagagcttcatggatcgaaagaagggatttacagaagttaagtcgcagaatggagaattcatgacccacaaacttaaacatactgagaatactttcagccgccctggagggagggccagcgtggacaccaaggaggctgagggcgccccccaggtggaagccggcaaaaggctggaggagcttcgtcgtcgtcgcggggagaccgagagcgaagagttcgagaagctcaaacagaagcagcaggaggcggctttggagctggaggaactcaagaaaaagagggaggagagaaggaaggtcctggaggaggaagagcagaggaggaagcaggaggaagccgatcgaaaactcagagaggaggaagagaagaggaggctaaaggaagagattgaaaggcgaagagcagaagctgctgagaaacgccagaagatgccagaagatggcttgtcagatgacaagaaaccattcaagtgtttcactcctaaaggttcatctctcaagatagaagagcgagcagaatttttgaataagtctgtgcagaaaagcagtggtgtcaaatcgacccatcaagcagcaatagtctccaagattgacagcagactggagcagtataccagtgcaattgagggaacaaaaagcgcaaaacctacaaagccggcagcctcggatcttcctgttcctgctgaaggtgtacgcaacatcaagagtatgtgggagaaagggaatgtgttttcatcccccactgcagcaggcacaccaaataaggaaactgctggcttgaaggtaggggtttctagccgcatcaatgaatggctaactaaaaccccagatggaaacaagtcacctgctcccaaaccttctgacttgagaccaggagacgtatccagcaagcggaacctctgggaaaagcaatctgtggataaggtcacttcccccactaaggtttgagacagttccagaaagaacccaagctcaagacgcaggacgagctcagttgtagagggctaattcgctctgttttgtatttatgttgatttactaaattgggttcattatcttttatttttcaatatcccagtaaacccatgtatattatcactatatttaataatcacagtctagagatgttcatggtaaaagtactgcctttgcacaggatcctgtttctaaagaaacccatgctgtgaaatagagacttttctactgatcatcataactctgtatctgagcagtgataccaaccacatctgaagtcaacagaagatccaagtttaaaattgctgcggaatgtgtgcagtatctagaaaaatgaaccgtagtttttgtttttttaaatacagaagtcatgttgtttctgcactttataataaagcatggaagaaattatcttagtaggcaattgtaacactttttgaaagtaacccatttcagatttgaaatactgcaataatggttgtctttaaaaaaaaaaagaatgtactgttaaggtattactttttttcatgctgatgattcatatctaaattacattattatgttagctgacagtggtactgattttttaggttggttgttttgtggatttctttagtagtgatagtagcctgaaccacattttagataactcaattatgtatgtatgtgcatacacatatacaaacacactaatggtagaatgcttttttatgtgctagactattatatttagtagtatgtcattgtaactagccaatatcacagcttttgaaaaattaaaaaatcatcatcactataatatttcatatttgccaacagaaacatggcagataggtatcaatatgttttcaatgcctgatgacctataagaagaaagtattgaaaagaagagagattagaactgttagaaggagttgaaattttctaaaagacatagtatttagtttataattaaatgcattcttgaagtcc

SEQ ID NO: 2611 - protein, 564 aa, Homo sapiens
MDDFERRRELRRQKREEMRLEAERIAYQRNDDDEEEAARERRRRARQERLRQKQEEESLGQVTDQVEVNAQNSVPDEEAKTTTTNTQVEGDDEAAFLERLARREERRQKRLQEALERQKEFDPTITDASLSLPSRRMQNDTAENETTEKEEKSESRQERYEIEETETVTKSYQKNDWRDAEENKKEDKEKEEEEEEKPKRGSIGENQGEEKGTKVQAKREKLQEDKPTFKKEEIKDEKIKKDKEPKEEVKSFMDRKKGFTEVKSQNGEFMTHKLKHTENTFSRPGGRASVDTKEAEGAPQVEAGKRLEELRRRRGETESEEFEKLKQKQQEAALELEELKKKREERRKVLEEEEQRRKQEEADRKLREEEEKRRLKEEIERRRAEAAEKRQKMPEDGLSDDKKPFKCFTPKGSSLKIEERAEFLNKSVQKSSGVKSTHQAAIVSKIDSRLEQYTSAIEGTKSAKPTKPAASDLPVPAEGVRNIKSMWEKGNVFSSPTAAGTPNKETAGLKVGVSSRINEWLTKTPDGNKSPAPKPSDLRPGDVSSKRNLWEKQSVDKVTSPTKV

SEQ ID NO: 2612 - DNA, 808 bp, Homo sapiens
tgctcccttgggctctagagaggaggcccctcttagccctcagcccctccttcctctctatcttaaagtaatttgatcctcaggaatttgttccgccctcatctggcccggccaaatcccgatttgacaaatgccaggaaaaggaaactgttgagaaaccgaaactactggggaaagggagggctcactgagtaaccatcccagtaacccgaccgccgctggtcttcgctggacaccatgagtcacactgtccaaaccttcttctctcctgtcaacagtggccagccccccaactatgagatgctcaaggaggagcacgaggtggctgtgctgggggggccccacaaccctgctcccccgacgtccaccgtgatccacatccgcagcgagacctccgtgcccgaccatgtcgtctggtccctgttcaacaccctcttcatgaacccctgctgcctgggcttcatagcattcgcctactccgtgaagtctagggacaggaagatggttggcgacgtgaccggggcccaggcctatgcctccaccgccaagtgcctgaacatctgggccctgattctgggcatcctcatgaccattctgctcatcgtcatcccagtgctgatcttccaggcctatggatagatcaggaggcatcactgaggccaggagctctgcccatgacctgtatcccacgtactccaacttccattcctcgccctgcccccggagccgagtcctgtatcagccctttatcctcacacgcttttctacaatggcattcaataaagtgcacgtgtttctggtgctgctg

SEQ ID NO: 2613 - protein, 133 aa, Homo sapiens
MSHTVQTFFSPVNSGQPPNYEMLKEEHEVAVLGGPHNPAPPTSTVIHIRSETSVPDHVVWSLFNTLFMNPCCLGFIAFAYSVKSRDRKMVGDVTGAQAYASTAKCLNIWALILGILMTILLIVIPVLIFQAYG

SEQ ID NO: 2614 - DNA, 4834 bp, Homo sapiens
cggcgcccgcgggctgggagccggggcccgcaggtggaagcgcacccgggaggcgggccggccggggctggagcggctcgggcgggctcttgacgctcagccagcttcgctccggcctcgggaaggcgcgcgtcccgccctgacccgccggcctctcccaccccagcagtgacgcgccgcctgggagctggagcccgcgcagcgccccgcagggcgatggacggccgaaccccgcgcccgcaggacgccccagccaggagaaaaccaaaagccaaggcaccacttcctccagctgagaccaaatatactgatgtctcttcagctgctgattctgtagaatccactgctttcatcatggaacagaaagaaaacatgatagataaagacgttgaactctcagtggtcctacctggggatattatcaaatctactactgttcatggcagtaaacctatgatggacttgttgatattcctttgtgcacagtatcacttaaatccatcaagttacacaatcgatctgttgtcagctgaacagaaccacattaaatttaagccaaacacaccaataggaatgttggaggtagagaaggtaattttaaagccaaaaatgttggataagaaaaaacctacacctataataccagagaaaactgtgagagtagtgattaattttaagaaaacacagaagaccatagtgagagtgagtccacatgcatcgcttcaagagcttgcccctattatatgtagcaaatgtgagtttgatccgttgcatacactattgttgaaagattatcaatcgcaggagcctcttgacttgacaaaatctcttaatgacctgggactaagagaattatatgcgatggatgtcaacagagagtcctgccaaatatcacaaaacctagatattatgaaggagaaagaaaataaagggtttttcagtttttttcaacgcagtaagaaaaagcgagaccaaactgcaagtgcccctgcaacccctctagtaaataagcaccgcccaacttttacaaggtccaataccatttccaaaccatatatttccaacaccctgccgtcggatgcacccaagaagaggcgggctccactgcccccgatgccagcatctcagagtgtcccccaagaccttgcacacatccaggagaggcctgcttcttgtatagtgaaatccatgagcgtggatgagacagataagagtccctgtgaagcaggaagagtgagggcaggttcactgcagctcagcagcatgtctgcagggaattcatctttgagaaggacaaagcgaaaagcaccttccccaccctccaaaatacccccgcatcaaagtgatgaaaatagtcgtgtgactgccttacagccagtagatggagttcctccagacagtgcttcagaagcaaactctcctgaggagctatccagcccagaaacctttcaccctgggctttccagtcaggagcagtgcactgcgcccaaactgatggaggaaacctctgtctttgagtgccctgggacacctgaggcagccataacatcattgacatctggaataagctctgattatagccttgaagagatagatgaaaaggaagaactgagtgaagtgcctaaagttgaagctgaaaatatttctccgaagtcacaagatattccttttgtatctactgatataataaatacactgaaaaatgatcctgactcagcccttggcaatggtagtggagagttctcacaaaactccatggaagaaaaacaagaaactaaaagcacagatggacaagaaccacacagtgtagtatatgatacaagcaatggaaagaaggtagttgacagtataagaaacttgaagtcgttgggcccaaaccaagagaatgttcaaaatgaaataattgtctatccagagaacacagaagacaatatgaaaaatggagtgaagaaaacagaaatcaatgtagaaggtgttgccaaaaataacaacattgatatggaagttgagagaccatcaaactctgaggcacatgaaactgatactgctataagttacaaggaaaaccatctagcagcttcatcagtaccagatcaaaaactgaatcaacccagtgcagaaaagacaaaagatgcagcaattcagacaaccccttcttgtaacagttttgatgggaaacaccaagatcataatttatctgactccaaagttgaagaatgtgtgcaaacttcaaataacaacatatcaactcaacactcatgcttaagttcacaagattctgtaaatacctcaagggaattcaggagtcaaggcaccctaattatacattcagaagatccgcttaccgtaaaagatccaatttgtgcacatggtaatgatgatcttttgcctcctgtagataggattgacaaaaattccactgcttcttacctaaagaattacccactttatagacaggactacaatcccaagccaaaaccttcaaatgaaattacacgagagtatatacccaaaattggcatgactacttataaaatagtgcctcccaaatccttggaaatatcgaaagactggcaatcagaaaccatagagtataaagatgatcaggacatgcatgctttagggaaaaagcacactcatgagaatgtgaaagaaactgccatccaaacagaagattctgctatttctgaaagcccagaagagccactgccaaaccttaaaccgaagcctaacctgagaacagagcatcaagtgcccagttctgtgagctcacctgatgatgccatggttagtcctctgaaacctgctcccaaaatgacaagagacactggcacagctccttttgcaccaaatttggaagaaataaacaatattttggaatcaaaatttaaatctcgggcttcaaatgcccaggccaaacccagctctttttttttgcagatgcagaagagagtatcgggtcactatgtgacatctgcagctgccaagagtgtccatgctgcccctaatcctgctccaaaagaactgacaaataaagaggcagaaagggatatgctgccttctccggagcagactctttctcccttaagtaaaatgcctcactctgttccacaaccccttgttgaaaaaactgatgatgatgtcatcggtcaggctcctgctgaagcctcccctcctcccatagctccaaaacctgtgacaattcctgctagtcaggtatccacacaaaatctgaagactttgaaaacttttggtgccccacgaccatactcaagttctggtccttcaccgtttgctcttgctgtagtgaaaaggtcacagtctttcagtaaagagcgcaccgagtcacctagtgccagtgcattggtccaacctccagccaacacagaggaagggaagactcattctgtaaataaatttgtggacatcccacagcttggtgtgtctgataaggaaaataactctgcacataatgaacagaattcccaaataccaactccaactgatggcccatcattcactgttatgagacaaagttctttaacattccaaagctctgacccagaacagatgcgacagagtttgctgactgcaatccgttcgggagaggctgctgccaaattgaaaagggttaccattccatcaaatacaatatctgtgaatggaaggtcaagactcagccattccatgtcccctgatgcccaggacggccattaaatgttaccctgccacaccactgcacttcacttccacttcagaccaacttcatactaatggaacattttggcaaatgtatattcagatgtacactaatatattatctattaaaatattagaatttgtgttgtggcttttaatgccagaagaaaagttaccagaatttataatttatagtaattttttgatcttttttttgccttaagagttgaatatgctgctttagaactttaaaacaaggtgtaaatgattttcattttttacaaatgaaaaataattcctttgtattgatttcacttaccagcacattctctacaatggtgacttagacaaaagtataagattcatagactttatatttgtatgacatacaactaggacaaacatagatatgacatttgctgcctcagtgtagcaattggaaatatttataagttatatgaaagcctgttttgggctgaaagaatgatttagaaaactagtgataccaaataagtatattcagttcaataattattttcaatgatgaatcacttagtgtgaaagacttgccttgtgtattctttatgtaattacaaatcactgtcaattttatgggaagctcatagtattttaatattttattaacatggaactcttgtttttttaatctttagaacttaaattctacaagaattttaaatattttctgtatataattatgacattgtcacacagaaattacacattttatgtgccagaagccttaaacatctttctgtgaaaatgctgatatattgtgacagttatttcacatttgatatgtagagaggaataggggttagtttatgtttatattgaaaaactttaaagactatttggaagttccagaaattctggttttaattcaagtaaaatgataaaatagtcattatatagttcagatgctaatattctaagtaataatatatatttacattgaagctaaaactgttaagcaaaacaatgcccatttgtcggcttacagctcttccggagtctagagcctgttggtgttctgtccctactttaagaatttaattgctcacttattctgaaagctttgttcaaacaagatgatattaaatttgttttcact

SEQ ID NO: 2615 - protein, 1166 aa, Homo sapiens
MDGRTPRPQDAPARRKPKAKAPLPPAETKYTDVSSAADSVESTAFIMEQKENMIDKDVELSVVLPGDIIKSTTVHGSKPMMDLLIFLCAQYHLNPSSYTIDLLSAEQNHIKFKPNTPIGMLEVEKVILKPKMLDKKKPTPIIPEKTVRVVINFKKTQKTIVRVSPHASLQELAPIICSKCEFDPLHTLLLKDYQSQEPLDLTKSLNDLGLRELYAMDVNRESCQISQNLDIMKEKENKGFFSFFQRSKKKRDQTASAPATPLVNKHRPTFTRSNTISKPYISNTLPSDAPKKRRAPLPPMPASQSVPQDLAHIQERPASCIVKSMSVDETDKSPCEAGRVRAGSLQLSSMSAGNSSLRRTKRKAPSPPSKIPPHQSDENSRVTALQPVDGVPPDSASEANSPEELSSPETFHPGLSSQEQCTAPKLMEETSVFECPGTPEAAITSLTSGISSDYSLEEIDEKEELSEVPKVEAENISPKSQDIPFVSTDIINTLKNDPDSALGNGSGEFSQNSMEEKQETKSTDGQEPHSVVYDTSNGKKVVDSIRNLKSLGPNQENVQNEIIVYPENTEDNMKNGVKKTEINVEGVAKNNNIDMEVERPSNSEAHETDTAISYKENHLAASSVPDQKLNQPSAEKTKDAAIQTTPSCNSFDGKHQDHNLSDSKVEECVQTSNNNISTQHSCLSSQDSVNTSREFRSQGTLIIHSEDPLTVKDPICAHGNDDLLPPVDRIDKNSTASYLKNYPLYRQDYNPKPKPSNEITREYIPKIGMTTYKIVPPKSLEISKDWQSETIEYKDDQDMHALGKKHTHENVKETAIQTEDSAISESPEEPLPNLKPKPNLRTEHQVPSSVSSPDDAMVSPLKPAPKMTRDTGTAPFAPNLEEINNILESKFKSRASNAQAKPSSFFLQMQKRVSGHYVTSAAAKSVHAAPNPAPKELTNKEAERDMLPSPEQTLSPLSKMPHSVPQPLVEKTDDDVIGQAPAEASPPPIAPKPVTIPASQVSTQNLKTLKTFGAPRPYSSSGPSPFALAVVKRSQSFSKERTESPSASALVQPPANTEEGKTHSVNKFVDIPQLGVSDKENNSAHNEQNSQIPTPTDGPSFTVMRQSSLTFQSSDPEQMRQSLLTAIRSGEAAAKLKRVTIPSNTISVNGRSRLSHSMSPDAQDGH

SEQ ID NO: 2616 - DNA, 470 bp, Homo sapiens
gtagttccggttccggcgtggccattttcgttggtggtgttcagttgtggcggttgctggtcagtaacagccaagatgctgcggaatctgctggctcttcgtcagattgggcagaggacgataagcactgcttcccgcaggcattttaaaaataaagttccggagaagcaaaaactgttccaggaggatgatgaaattccactgtatctaaagggtggggtagctgatgccctcctgtatagagccaccatgattcttacagttggtggaacagcatatgccatatatgagctggctgtggcttcatttcccaagaagcaggagtgacttcagtcatcccagcaatcgcttggttcagtttcattcagctctctatggaccagtaatctgataaataaccgagctcttctttggggatcaatatttattgacttgtagtaactgccaccaataaagcagtctttaccatg

SEQ ID NO: 2617 - protein, 83 aa, Homo sapiens
MLRNLLALRQIGQRTISTASRRHFKNKVPEKQKLFQEDDEIPLYLKGGVADALLYRATMILTVGGTAYAIYELAVASFPKKQE

SEQ ID NO: 2618 - DNA, 1436 bp, Homo sapiens
accctgccctcggccttgtcccgggatcgctccgtcgcacccaccatgatggaagacgacgggcagccccggactctatacgtaggtaacctttccagagatgtgacagaagtccttatacttcagttgttcagtcagattggaccctgtaaaagctgtaaaatgataacagagcatacaagcaatgacccatattgctttgtggaattttatgaacacagagatgcagctgctgcattagctgctatgaatgggagaaaaattttgggaaaggaggtcaaagtaaactgggcaaccacaccaagtagccagaaaaaagatacttccaatcacttccatgtgtttgttggggatttgagtccagaaattacaacagaagatatcaaatcagcatttgccccctttggtaaaatatcggatgcccgggtagttaaagacatggcaactggaaaatccaaaggctatggttttgtatctttttataacaaactggatgcagaaaatgcgattgtgcatatgggcggtcagtggttgggtggtcgtcaaatccgaaccaattgggccactcgtaaaccacctgcacctaaaagtacacaagaaaacaacactaagcagttgagatttgaagatgtagtaaaccagtcaagtccaaaaaattgtactgtgtactgtggaggaattgcgtctgggttaacagatcagcttatgagacagacattctcaccatttggacaaattatggaaataagagttttcccagaaaagggctattcatttgtcagattttcaacccatgaaagtgcagcccatgccattgtttcggtgaacggtactacgattgaaggacatgtggttaaatgctattggggtaaagaatctcctgatatgactaaaaacttccaacaggttgactatagtcaatggggccaatggagccaagtgtatggaaacccacaacagtatggacagtatatggcaaatgggtggcaagtaccgccttatggagtatacgggcaaccatggaatcaacaaggatttggagtagatcaatcaccttctgctgcttggatgggtggatttggtgctcagcctccccaaggacaagctcctccccctgtaatacctcctcctaaccaagccggatatggtatggcaagttaccaaacacagtgagccgggactctaaaaaaaaattgtaattcatgataggcttcgatttcctgtgacactctgaagacatgaaagtagacatcggaaaatgaaaatatttattttaaaaattgaaatgtttggaacctttagcacagatttgctttggtgaaggacacgtgtcttctagttctgcctttttaagtttttgttcatgatggatatgaacatgatttttctttatgtacaaaaactaaaataaagtcaataaagacaattctgactac

SEQ ID NO: 2619 - protein, 375 aa, Homo sapiens
MMEDDGQPRTLYVGNLSRDVTEVLILQLFSQIGPCKSCKMITEHTSNDPYCFVEFYEHRDAAAALAAMNGRKILGKEVKVNWATTPSSQKKDTSNHFHVFVGDLSPEITTEDIKSAFAPFGKISDARVVKDMATGKSKGYGFVSFYNKLDAENAIVHMGGQWLGGRQIRTNWATRKPPAPKSTQENNTKQLRFEDVVNQSSPKNCTVYCGGIASGLTDQLMRQTFSPFGQIMEIRVFPEKGYSFVRFSTHESAAHAIVSVNGTTIEGHVVKCYWGKESPDMTKNFQQVDYSQWGQWSQVYGNPQQYGQYMANGWQVPPYGVYGQPWNQQGFGVDQSPSAAWMGGFGAQPPQGQAPPPVIPPPNQAGYGMASYQTQ

SEQ ID NO: 2620 - DNA, 1760 bp, Homo sapiens
cccggactctacacacacaagctaagacatatggttctatcttcagaaaacaatatggtgtttagagcctagatacgtgggtaacctttccagagatgtgacagaagtccttatacttcagttgttcagtcagattggaccctgtaaaagctgtaaaatgataacagagcatacaagcaatgacccatattgctttgtggaattttatgaacacagagatgcagctgctgcattagctgctatgaatgggagaaaaattttgggaaaggaggtcaaagtaaactgggcaaccacaccaagtagccagaaaaaagatacttccaatcacttccatgtgtttgttggggatttgagtccagaaattacaacagaagatatcaaatcagcatttgccccctttggtaaaatatcggatgcccgggtagttaaagacatggcaactggaaaatccaaaggctatggttttgtatctttttataacaaactggatgcagaaaatgcgattgtgcatatgggcggtcagtggttgggtggtcgtcaaatccgaaccaattgggccactcgtaaaccacctgcacctaaaagtacacaagaaaacaacactaagcagttgagatttgaagatgtagtaaaccagtcaagtccaaaaaattgtactgtgtactgtggaggaattgcgtctgggttaacagatcagcttatgagacagacattctcaccatttggacaaattatggaaataagagttttcccagaaaagggctattcatttgtcagattttcaacccatgaaagtgcagcccatgccattgtttcggtgaacggtactacgattgaaggacatgtggttaaatgctattggggtaaagaatctcctgatatgactaaaaacttccaacaggtaattcgatttttcatagcattctttaaggtttccatcttacatgtcacataaaagctttggaaactctgtaaaatgaacaataaaataaagcatatagctactttcagttgattgtatttcaaaattgattatttgcggtattaactgaatcttaatactttcttttcacaggtgtcaccaccccaataaacttagacaatgataaataacagagtcctattcacataagggtgcttacttagtttttctcttccttgtctcccactctttcttcatatacggtgtttcttatgtgttccctaaaacaatactttgctttttcctaggttgactatagtcaatggggccaatggagccaagtgtatggaaacccacaacagtatggacagtatatggcaaatgggtggcaagtaccgccttatggagtatacgggcaaccatggaatcaacaaggatttggagtagatcaatcaccttctgctgcttggatgggtggatttggtgctcagcctccccaaggacaagctcctccccctgtaatacctcctcctaaccaagccggatatggtatggcaagttaccaaacacagtgagccgggactctaaaaaaaaattgtaattcatgataggcttcgatttcctgtgacactctgaagacatgaaagtagacatcggaaaatgaaaatatttattttaaaaattgaaatgtttggaacctttagcacagatttgctttggtgaaggacacgtgtcttctagttctgcctttttaagtttttgttcatgatggatatgaacatgatttttctttatgtacaaaaactaaaataaagtcaataaagacaattctgactac

SEQ ID NO: 2621 - protein, 265 aa, Homo sapiens
MITEHTSNDPYCFVEFYEHRDAAAALAAMNGRKILGKEVKVNWATTPSSQKKDTSNHFHVFVGDLSPEITTEDIKSAFAPFGKISDARVVKDMATGKSKGYGFVSFYNKLDAENAIVHMGGQWLGGRQIRTNWATRKPPAPKSTQENNTKQLRFEDVVNQSSPKNCTVYCGGIASGLTDQLMRQTFSPFGQIMEIRVFPEKGYSFVRFSTHESAAHAIVSVNGTTIEGHVVKCYWGKESPDMTKNFQQVIRFFIAFFKVSILHVT

SEQ ID NO: 2622 - DNA, 455 bp, Homo sapiens
cttcctctttccctcggagcgggcggcggcgttggcggcttgtgcagcaatggccaagatcaaggctcgagatcttcgcgggaagaagaaggaggagctgctgaaacagctggacgacctgaaggtggagctgtcccagctgcgcgtcgccaaagtgacaggcggtgcggcctccaagctctctaagatccgagtcgtccggaaatccattgcccgtgttctcacagttattaaccagactcagaaagaaaacctcaggaaattctacaagggcaagaagtacaagcccctggacctgcggcctaagaagacacgtgccatgcgccgccggctcaacaagcacgaggagaacctgaagaccaagaagcagcagcggaaggagcggctgtacccgctgcggaagtacgcggtcaaggcctgaggggcgcattgtcaataaagcacagctggctgag

SEQ ID NO: 2623 - protein, 123 aa, Homo sapiens [sequence omitted]

SEQ ID NO: 2624 - DNA, 618 bp, Homo sapiens
gccgggtgaccacgggcccggcccgcagaaaggaggcggcgcggccggcagggatcaggactggagggggcggagcctccctcgcggccgggcccggagtgggaggggcctccgggaccaggcctctagtgcgcactctcggaagcgcagccgaacccgccctccgaatccagagaggcgctgctgacaccgccgccacaccgccgccacaccgccgctgcctcagtcatgccgaagcacgagttctctgtggacatgacctgtggaggctgtgctgaagctgtctctcgggtcctcaataagcttggaggagttaagtatgacattgacctgcccaacaagaaggtctgcattgaatctgagcacagcatggacactctgcttgcaaccctgaagaaaacaggaaagactgtttcctaccttgggcttgagtagcaggggcctggtccccacagcccacaggatggacccaagggggcaggatgctgatcctcccgctggcttccagacagacctgggacttggcagtcatgccgggtgatggtgttcctgcggagaccctcagttgtcctattccttcctagcttccctgcaataaaatcaagctgcttttgttgg

SEQ ID NO: 2625 - protein, 68 aa, Homo sapiens
MPKHEFSVDMTCGGCAEAVSRVLNKLGGVKYDIDLPNKKVCIESEHSMDTLLATLKKTGKTVSYLGLE

SEQ ID NO: 2626 - DNA, 3820 bp, Homo sapiens
cagcagtgagtcggagctctatggaggtggcagcgggtaccgagtggcggctgcagcagcgactcctctgagctgagtttgaggccgtccccgactccttcctcccccttccctcccccttttttttgttttccgttcccctttcccctcccttccctatccccgacgaccggatcctgaggaggcagctgcggtggcagctgctgagttctcggtgaaggtatttcatttctcctgtcccctcccctccccaccccatctattaatattattcttttgaagattcttcgttgtcaagccgccaaagtggagagtgcgattgcagaagggggtgcttctcgtttcagtgcttcttcgggcggaggaggaagtaggggtgcacctcagcactatcccaagactgctggcaacagcgagttcctggggaaaaccccagggcaaaacgctcagaaatggattcctgcacgaagcactagacgagatgacaactccgcagcaaacaactccgcaaacgaaaaagaacgacatgatgcaatcttcaggaaagtaagaggcatactaaataagcttactcctgaaaagtttgacaagctatgccttgagctcctcaatgtgggtgtagagtctaaactcatccttaaaggggtcatactgctgattgtggacaaagccctagaagagccaaagtatagctcactgtatgctcagctatgtctgcgattggcagaagatgcaccaaactttgatggcccagcagcagagggtcaaccaggacagaagcaaagcaccacattcagacgcctcctaatttccaaattacaagatgaatttgaaaaccgaactagaaatgttgatgtctatgataagcgtgaaaatcccctcctccccgaggaggaggaacagagagccattgctaagatcaagatgttgggaaacatcaaattcattggagagcttggcaagcttgatcttattcacgaatctatccttcataagtgcatcaaaacacttttggaaaagaagaagagagtccaactcaaagatatgggagaggatttggagtgcctctgtcagataatgaggacagtgggacctagattagaccatgaacgagccaagtccttaatggatcagtactttgcccgaatgtgctccttgatgttaagtaaggaattgccagcaaggattcgtttcctgctgcaggataccgtagagttgcgagaacaccattgggttcctcgcaaggcttttcttgacaatggaccaaagacgatcaatcaaattcgtcaagatgcagtaaaagatctaggggtgtttattcctgctcctatggctcaagggatgagaagtgacttctttctggagggaccgttcatgccacccaggatgaaaatggatagggacccacttggaggacttgctgatatgtttggacaaatgccaggtagcggaattggtactggtccaggagttatccaggatagattttcacccaccatgggacgtcatcgttcaaatcaactcttcaatggccatgggggacacatcatgcctcccacacaatcgcagtttggagagatgggaggcaagtttatgaaaagccaggggctaagccagctctaccataaccagagtcagggactcttatcccagctgcaaggacagtcgaaggatatgccacctcggttttctaagaaaggacagcttaatgcagatgagattagcctgaggcctgctcagtcgttcctaatgaataaaaatcaagtgccaaagcttcagccccagataactatgattcctcctagtgcacaaccaccacgcactcaaacaccacctctgggacagacacctcagcttggtctcaaaactaatccaccacttatccaggaaaagcctgccaagaccagcaaaaagccaccaccgtcaaaggaagaactccttaaactaactgaaactgttgtgactgaatatctaaatagtggaaatgcaaatgaggctgtcaatggtgtaagagaaatgagggctcctaaacactttcttcctgagatgttaagcaaagtaatcatcctgtcactagatagaagcgatgaagataaagaaaaagcaagttctttgatcagtttactcaaacaggaagggatagccacaagtgacaacttcatgcaggctttcctgaatgtattggaccagtgtcccaaactggaggttgacatccctttggtgaaatcctatttagcacagtttgcagctcgtgccatcatttcagagctggtgagcatttcagaactagctcaaccactagaaagtggcacccattttcctctcttcctactttgtcttcagcagttagctaaattacaagatcgagaatggttaacagaactttttcaacaaagcaaggtcaatatgcagaaaatgctcccagaaattgatcagaataaggaccgcatgttggagattttggaaggaaagggactgagtttcttattcccactcctcaaattggagaaggaactgttgaagcaaataaagttggatccatcccctcaaaccatatataaatggattaaagataacatctctcccaaacttcatgtagataaaggatttgtgaacatcttaatgactagcttcttacagtacatttctagtgaagtaaacccccccagcgatgaaacagattcatcctctgctccttccaaagaacagttagagcaggaaaaacaactactactatctttcaagccagtaatgcagaaatttcttcatgatcacgttgatctacaagtcagtgccctgtatgctctccaggtgcactgctataacagcaacttcccaaaaggcatgttacttcgcttttttgtgcacttctatgacatggaaattattgaagaagaagctttcttggcttggaaagaagatataacccaagagtttccgggaaaaggcaaggctttgttccaggtgaatcagtggctaacctggttagaaactgctgaagaagaagaatcagaggaagaagctgactaaagaaccagccaaagccttaaattgtgcaaaacatactgttgctatgatgtaactgcatttgacctaaccactgcgaaaattcattccgctgtaatgttttcacaatatttaaagcagaagcacgtcagttaggatttccttctgcataaggtttttttgtagtgtaatgtcttaatcatagtctaccatcaaatattttaggagtatctttaatgtttagatagtatattagcagcatgcaataattacatcataagttctcaagcagaggcagtctattgcaaggaccttctttgctgccagttatcataggctgttttaagttagaaaactgaatagcaacactgaatactgtagaaatgcactttgctcagtaatacttgagttgttgcaatatttgattatccatttggttgttacagaaaaattcttaactgtaattgatggttgttgccgtaatagtatattgcctgtatttctacctctagtaatgggctttatgtgctagattttaatatccttgagcctgggcaagtgcacaagtctttttaaaagaaacatggtttacttgcacaaaactgatcagttttgagagatcgttaatgcccttgaagtggtttttgtgggtgtgaaacaaatggtgagaatttgaattggtccctcctattatagtattgaaattaagtctacttaatttatcaagtcatgttcatgccctgattttatatacttgtatctatcaataaacattgtgatacttgaaaaaaaaaaaaaaaaaaaaaaaaaaaaa

SEQ ID NO: 2627 - protein, 907 aa, Homo sapiens
MESAIAEGGASRFSASSGGGGSRGAPQHYPKTAGNSEFLGKTPGQNAQKWIPARSTRRDDNSAANNSANEKERHDAIFRKVRGILNKLTPEKFDKLCLELLNVGVESKLILKGVILLIVDKALEEPKYSSLYAQLCLRLAEDAPNFDGPAAEGQPGQKQSTTFRRLLISKLQDEFENRTRNVDVYDKRENPLLPEEEEQRAIAKIKMLGNIKFIGELGKLDLIHESILHKCIKTLLEKKKRVQLKDMGEDLECLCQIMRTVGPRLDHERAKSLMDQYFARMCSLMLSKELPARIRFLLQDTVELREHHWVPRKAFLDNGPKTINQIRQDAVKDLGVFIPAPMAQGMRSDFFLEGPFMPPRMKMDRDPLGGLADMFGQMPGSGIGTGPGVIQDRFSPTMGRHRSNQLFNGHGGHIMPPTQSQFGEMGGKFMKSQGLSQLYHNQSQGLLSQLQGQSKDMPPRFSKKGQLNADEISLRPAQSFLMNKNQVPKLQPQITMIPPSAQPPRTQTPPLGQTPQLGLKTNPPLIQEKPAKTSKKPPPSKEELLKLTETVVTEYLNSGNANEAVNGVREMRAPKHFLPEMLSKVIILSLDRSDEDKEKASSLISLLKQEGIATSDNFMQAFLNVLDQCPKLEVDIPLVKSYLAQFAARAIISELVSISELAQPLESGTHFPLFLLCLQQLAKLQDREWLTELFQQSKVNMQKMLPEIDQNKDRMLEILEGKGLSFLFPLLKLEKELLKQIKLDPSPQTIYKWIKDNISPKLHVDKGFVNILMTSFLQYISSEVNPPSDETDSSSAPSKEQLEQEKQLLLSFKPVMQKFLHDHVDLQVSALYALQVHCYNSNFPKGMLLRFFVHFYDMEIIEEEAFLAWKEDITQEFPGKGKALFQVNQWLTWLETAEEEESEEEAD

SEQ ID NO: 2628 - DNA, 4977 bp, Homo sapiens
cggggcccggggggcgggggcctgacggccgggccgggcggcggagctgcaagggacagaggcgcggcaggcgcgcggagccagcggagccagctgagcccgagcccagcccgcgcccgcgccgccatgcccctggccttctgcggcagcgagaaccactcggccgcctaccgggtggaccagggggtcctcaacaacggctgctttgtggacgcgctcaacgtggtgccgcacgtcttcctactcttcatcaccttccccatcctcttcattggatggggaagtcagagctccaaggtgcacatccaccacagcacatggcttcatttccccgggcacaacctgcggtggatcctgaccttcatgctgctcttcgtcctggtgtgtgagattgcagagggcatcctgtctgatggggtgaccgaatcccaccatctgcacctgtacatgccagccgggatggcgttcatggctgctgtcacctccgtggtctactatcacaacatcgagacttccaacttccccaagctgctaattgccctgctggtgtattggaccctggccttcatcaccaagaccatcaagtttgtcaagctcttggaccacgccatcggcttctcgcagctacgcttctgcctcacagggctgctggtgatcctctatgggatgctgctcctcgtggaggtcaatgtcatcagggtgaggagatacatcttcttcaagacaccgagggaggtgaagcctcccgaggacctgcaagacctgggggtacgcttcctgcagcccttcgtgaatctgccgtccaaaggcacctactggtggatgaacgccttcatcaagactgcccacaagaagcccatcgacttgcgagccatcgggaagctgcccatcgttatgagggccctcaccaactaccaacggctctgcgaggcctttgacgcccaggtgcggaaggacattcagggcactcaaggtgcccgggccatctggcaggcactcagccatgccttcgggaggcgcctggtcctcagcagcactttccgcatcttggccgacctgctgggcttcgccgggccactgtgcatctttgggatcgtggaccaccttgggaaggagaacgacgtcttccagcccaagacacaatttctcggggtttactttgtctcatcccaagagttccttgccaatgcctacgtcttagctgtgcttctgttccttgccctcctactgcaaaggacatttctgcaagcatcctactatgtggccattgaaactggaattaacttgagaggagcaatacagaccaagatttacaataaaattatgcacctgtccacctccaacctgtccatgggagaaatgactgctggacagatctgtaatctggttgccatcgacaccaatcagctcatgtggtttttcttcttgtgcccaaacctctgggctatgccagtacagatcattgtgggtgtgattctcctctactacatactcggagtcagtgccttaattggagcagctgtcatcattctactggctcctgtccagtacttcgtggccaccaagctgtctcaggcccagcggagcacactggagtattccaatgagcggctgaagcagaccaacgagatgctccgcggcatcaagctgctgaagctgtacgcctgggagaacatcttccgcacgcgggtggagacgacccgcaggaaggagatgaccagcctcagggcctttgccatctatacctccatctccattttcatgaacacggccatccccattgcagctgtcctcataactttcgtgggccatgtcagcttcttcaaagaggccgacttctcgccctccgtggcctttgcctccctctccctcttccatatcttggtcacaccgctgttcctgctgtccagtgtggtccgatctaccgtcaaagctctagtgagcgtgcaaaagctaagcgagttcctgtccagtgcagagatccgtgaggagcagtgtgccccccatgagcccacacctcagggcccagccagcaagtaccaggcggtgcccctcagggttgtgaaccgcaagcgtccagcccgggaggattgtcggggcctcaccggcccactgcagagcctggtccccagtgcagatggcgatgctgacaactgctgtgtccagatcatgggaggctacttcacgtggaccccagatggaatccccacactgtccaacatcaccattcgtatcccccgaggccagctgactatgatcgtggggcaggtgggctgcggcaagtcctcgctccttctagccgcactgggggagatgcagaaggtctcaggggctgtcttctggagcagccttcctgacagcgagataggagaggaccccagcccagagcgggagacagcgaccgacttggatatcaggaagagaggccccgtggcctatgcttcgcagaaaccatggctgctaaatgccactgtggaggagaacatcatctttgagagtcccttcaacaaacaacggtacaagatggtcattgaagcctgctctctgcagccagacatcgacatcctgccccatggagaccagacccagattggggaacggggcatcaacctgtctggtggtcaacgccagcgaatcagtgtggcccgagccctctaccagcacgccaacgttgtcttcttggatgaccccttctcagctctggatatccatctgagtgaccacttaatgcaggccggcatccttgagctgctccgggacgacaagaggacagtggtcttagtgacccacaagctacagtacctgccccatgcagactggatcattgccatgaaggatgggaccatccagagggagggtaccctcaaggacttccagaggtctgaatgccagctctttgagcactggaagaccctcatgaaccgacaggaccaagagctggagaaggagactgtcacagagagaaaagccacagagccaccccagggcctatctcgtgccatgtcctcgagggatggccttctgcaggatgaggaagaggaggaagaggaggcagctgagagcgaggaggatgacaacctgtcgtccatgctgcaccagcgtgctgagatcccatggcgagcctgcgccaagtacctgtcctccgccggcatcctgctcctgtcgttgctggtcttctcacagctgctcaagcacatggtcctggtggccatcgactactggctggccaagtggaccgacagcgccctgaccctgacccctgcagccaggaactgctccctcagccaggagtgcaccctcgaccagactgtctatgccatggtgttcacggtgctctgcagcctgggcattgtgctgtgcctcgtcacgtctgtcactgtggagtggacagggctgaaggtggccaagagactgcaccgcagcctgctaaaccggatcatcctagcccccatgaggttttttgagaccacgccccttgggagcatcctgaacagattttcatctgactgtaacaccatcgaccagcacatcccatccacgctggagtgcctgagccgctccaccctgctctgtgtctcagccctggccgtcatctcctatgtcacacctgtgttcctcgtggccctcttgcccctcgcagtcgtgtgctacttcatccagaagtacttccgggtggcgtccagggacctgcagcagctggatgacaccacccagcttccacttctctcacactttgccgaaaccgtagaaggactcaccaccatccgggccttcaggtatgaggcccggttccagcagaagcttctcgaatacacagactccaacaacattgcttccctcttcctcacagctgccaacagatggctggaagtccgaatggagtacatcggtgcatgtgtggtgctcatcgcagcggtgacctccatctccaactccctgcacagggagctctctgctggcctggtgggcctgggccttacctacgccctaatggtctccaactacctcaactggatggtgaggaacctggcagacatggagctccagctgggggctgtgaagcgcatccatgggctcctgaaaaccgaggcagagagctacgaggggctcctggcaccatcgctgatcccaaagaactggccagaccaagggaagatccagatccagaacctgagcgtgcgctacgacagctccctgaagccggtgctgaagcacgtcaatgccctcatctcccctggacagaagatcgggatctgcggccgcaccggcagtgggaagtcctccttctctcttgccttcttccgcatggtggacacgttcgaagggcacatcatcattgatggcattgacatccgcaaactgccgctgcacaccctgccgtcacgcctctccatcatcctgcaggaccccgtcctcttcagcggcaccatccgatttaacctggaccctgagaggaagtgctcagatagcacactgtgggaggccctggaaatcgcccagctgaagctggtggtgaaggcactgccaggaggcctcgatgccatcatcacagaaggcggggagaatttcagccagggacagaggcagctgttctgcctggcccgggccttcgtgaggaagaccagcatcttcatcatggacgaggccacggcttccattgacatggccacggaaaacatcctccaaaaggtggtgatgacagccttcgcagaccgcactgtggtcaccatcgcgcatcgagtgcacaccatcctgagtgcagacctggtgatcgtcctgaagcggggtgccatccttgagttcgataagccagagaagctgctcagccggaaggacagcgtcttcgcctccttcgtccgtgcagacaagtgacctgccagagcccaagtgccatcccacattcggaccctgcccatacccctgcctgggttttctaactgtaaatcacttgtaaataaatagatttgattatttcct

SEQ ID NO: 2629 - protein, 1581 aa, Homo sapiens
MPLAFCGSENHSAAYRVDQGVLNNGCFVDALNVVPHVFLLFITFPILFIGWGSQSSKVHIHHSTWLHFPGHNLRWILTFMLLFVLVCEIAEGILSDGVTESHHLHLYMPAGMAFMAAVTSVVYYHNIETSNFPKLLIALLVYWTLAFITKTIKFVKLLDHAIGFSQLRFCLTGLLVILYGMLLLVEVNVIRVRRYIFFKTPREVKPPEDLQDLGVRFLQPFVNLPSKGTYWWMNAFIKTAHKKPIDLRAIGKLPIVMRALTNYQRLCEAFDAQVRKDIQGTQGARAIWQALSHAFGRRLVLSSTFRILADLLGFAGPLCIFGIVDHLGKENDVFQPKTQFLGVYFVSSQEFLANAYVLAVLLFLALLLQRTFLQASYYVAIETGINLRGAIQTKIYNKIMHLSTSNLSMGEMTAGQICNLVAIDTNQLMWFFFLCPNLWAMPVQIIVGVILLYYILGVSALIGAAVIILLAPVQYFVATKLSQAQRSTLEYSNERLKQTNEMLRGIKLLKLYAWENIFRTRVETTRRKEMTSLRAFAIYTSISIFMNTAIPIAAVLITFVGHVSFFKEADFSPSVAFASLSLFHILVTPLFLLSSVVRSTVKALVSVQKLSEFLSSAEIREEQCAPHEPTPQGPASKYQAVPLRVVNRKRPAREDCRGLTGPLQSLVPSADGDADNCCVQIMGGYFTWTPDGIPTLSNITIRIPRGQLTMIVGQVGCGKSSLLLAALGEMQKVSGAVFWSSLPDSEIGEDPSPERETATDLDIRKRGPVAYASQKPWLLNATVEENIIFESPFNKQRYKMVIEACSLQPDIDILPHGDQTQIGERGINLSGGQRQRISVARALYQHANVVFLDDPFSALDIHLSDHLMQAGILELLRDDKRTVVLVTHKLQYLPHADWIIAMKDGTIQREGTLKDFQRSECQLFEHWKTLMNRQDQELEKETVTERKATEPPQGLSRAMSSRDGLLQDEEEEEEEAAESEEDDNLSSMLHQRAEIPWRACAKYLSSAGILLLSLLVFSQLLKHMVLVAIDYWLAKWTDSALTLTPAARNCSLSQECTLDQTVYAMVFTVLCSLGIVLCLVTSVTVEWTGLKVAKRLHRSLLNRIILAPMRFFETTPLGSILNRFSSDCNTIDQHIPSTLECLSRSTLLCVSALAVISYVTPVFLVALLPLAVVCYFIQKYFRVASRDLQQLDDTTQLPLLSHFAETVEGLTTIRAFRYEARFQQKLLEYTDSNNIASLFLTAANRWLEVRMEYIGACVVLIAAVTSISNSLHRELSAGLVGLGLTYALMVSNYLNWMVRNLADMELQLGAVKRIHGLLKTEAESYEGLLAPSLIPKNWPDQGKIQIQNLSVRYDSSLKPVLKHVNALISPGQKIGICGRTGSGKSSFSLAFFRMVDTFEGHIIIDGIDIRKLPLHTLPSRLSIILQDPVLFSGTIRFNLDPERKCSDSTLWEALEIAQLKLVVKALPGGLDAIITEGGENFSQGQRQLFCLARAFVRKTSIFIMDEATASIDMATENILQKVVMTAFADRTVVTIAHRVHTILSADLVIVLKRGAILEFDKPEKLLSRKDSVFASFVRADK

SEQ ID NO: 2630 - DNA, 1947 bp, Homo sapiens
ggcacgaggccaagagctacgcggcggcggcggagcgcaggcctcgtgccgttacggccatcacggcggccgcagtggcgtcctggagccctcctcagtgctgaagctgctgaaagatggcagaagaagtggtggtagtagccaaatttgattatgtggcccaacaagaacaagagttggacatcaagaagaatgagagattatggcttctggatgattctaagtcctggtggcgagttcgaaattccatgaataaaacaggttttgtgccttctaactatgtggaaaggaaaaacagtgctcggaaagcatctattgtgaaaaacctaaaggataccttaggcattggaaaagtgaaaagaaaacctagtgtgccagattctgcatctcctgctgatgatagttttgttgacccaggggaacgtctctatgacctcaacatgcccgcttatgtgaaatttaactacatggctgagagagaggatgaattatcattgataaaggggacaaaggtgatcgtcatggagaaatgcagtgatgggtggtggcgtggtagctacaatggacaagttggatggttcccttcaaactatgtaactgaagaaggtgacagtcctttgggtgaccatgtgggttctctgtcagagaaattagcagcagtcgtcaataacctaaatactgggcaagtgttgcatgtggtacaggctctttacccattcagctcatctaatgatgaagaacttaatttcgagaaaggagatgtaatggatgttattgaaaaacctgaaaatgacccagagtggtggaaatgcaggaagatcaatggtatggttggtctagtaccaaaaaactatgttaccgttatgcagaataatccattaacttcaggtttggaaccatcacctccacagtgtgattacattaggccttcactcactggaaagtttgctggcaatccttggtattatggcaaagtcaccaggcatcaagcagaaatggcattaaatgaaagaggacatgaaggggatttcctcattcgtgatagtgaatcttcgccaaatgatttctcagtatcactaaaagcacaagggaaaaacaagcattttaaagtccaactaaaagagactgtctactgcattgggcagcgtaaattcagcaccatggaagaacttgtagaacattacaaaaaggcaccaatttttacaagtgaacaaggagaaaaattatatcttgtcaagcatttatcatgatactgctgaccagaagtgactgctgtgtagctgtaatttgtcatgtaattgaagactgagaaaatgttgggtccagtcgtgcttgattggaaattgttgtttctaaatctatatgagaattgacaataagtatttttattataactcagcccatacatatatactatgtatgcagtgcatctgcatagaacagttccttatccttggccttctgttttattgtttttttctttgctgttttccctttgcttctaatattacagttttgtattttgtaaacaaaaatcaaataatgcatatcagaatctttatatggaagaaatcctttattgcctttcctttgtttccttgtaaaggcaccctgttctgttatggtttttcattatataaaattattatatctatatatgacatatgctaaaatttcttggagagtgttaatcttttctgtgactaaatagcaataataagtggaaaattagaaattatttccaggtattatatttgtcacaggccattgtaaataccaagtatattgtgtctgccataatttttaaaaatacattcattgtcttcagtcatacagcaagacacatgagacatagattagaaaacatgttgtacaattttaatttacaactgttggaaataaaaatcacttaatttttttccaaaaaaaaaaaaaaaaaaaaaaaaa

SEQ ID NO: 2631 - protein, 377 aa, Homo sapiens
MAEEVVVVAKFDYVAQQEQELDIKKNERLWLLDDSKSWWRVRNSMNKTGFVPSNYVERKNSARKASIVKNLKDTLGIGKVKRKPSVPDSASPADDSFVDPGERLYDLNMPAYVKFNYMAEREDELSLIKGTKVIVMEKCSDGWWRGSYNGQVGWFPSNYVTEEGDSPLGDHVGSLSEKLAAVVNNLNTGQVLHVVQALYPFSSSNDEELNFEKGDVMDVIEKPENDPEWWKCRKINGMVGLVPKNYVTVMQNNPLTSGLEPSPPQCDYIRPSLTGKFAGNPWYYGKVTRHQAEMALNERGHEGDFLIRDSESSPNDFSVSLKAQGKNKHFKVQLKETVYCIGQRKFSTMEELVEHYKKAPIFTSEQGEKLYLVKHLS

SEQ ID NO: 2632 - DNA, 12515 bp, Homo sapiens
ctaccgggcggaggtgagcgcggcgccggctcctcctgcggcggactttgggtgcgacttgacgagcggtggttcgacaagtggccttgcgggccggatcgtcccagtggaagagttgtaaatttgcttctggccttcccctacggattatacctggccttcccctacggattatactcaacttactgtttagaaaatgtggcccacgagacgcctggttactatcaaaaggagcggggtcgacggtccccactttcccctgagcctcagcacctgcttgtttggaaggggtattgaatgtgacatccgtatccagcttcctgttgtgtcaaaacaacattgcaaaattgaaatccatgagcaggaggcaatattacataatttcagttccacaaatccaacacaagtaaatgggtctgttattgatgagcctgtacggctaaaacatggagatgtaataactattattgatcgttccttcaggtatgaaaatgaaagtcttcagaatggaaggaagtcaactgaatttccaagaaaaatacgtgaacaggagccagcacgtcgtgtctcaagatctagcttctcttctgaccctgatgagaaagctcaagattccaaggcctattcaaaaatcactgaaggaaaagtttcaggaaatcctcaggtacatatcaagaatgtcaaagaagacagtaccgcagatgactcaaaagacagtgttgctcagggaacaactaatgttcattcctcagaacatgctggacgtaatggcagaaatgcagctgatcccatttctggggattttaaagaaatttccagcgttaaattagtgagccgttatggagaattgaagtctgttcccactacacaatgtcttgacaatagcaaaaaaaatgaatctcccttttggaagctttatgagtcagtgaagaaagagttggatgtaaaatcacaaaaagaaaatgtcctacagtattgtagaaaatctggattacaaactgattacgcaacagagaaagaaagtgctgatggtttacagggggagacccaactgttggtctcgcgtaagtcaagaccaaaatctggtgggagcggccacgctgtggcagagcctgcttcacctgaacaagagcttgaccagaacaaggggaagggaagagacgtggagtctgttcagactcccagcaaggctgtgggcgccagctttcctctctatgagccggctaaaatgaagacccctgtacaatattcacagcaacaaaattctccacaaaaacataagaacaaagacctgtatactactggtagaagagaatctgtgaatctgggtaaaagtgaaggcttcaaggctggtgataaaactcttactcccaggaagctttcaactagaaatcgaacaccagctaaagttgaagatgcagctgactctgccactaagccagaaaatctctcttccaaaaccagaggaagtattcctacagatgtggaagttctgcctacggaaactgaaattcacaatgagccatttttaactctgtggctcactcaagttgagaggaagatccaaaaggattccctcagcaagcctgagaaattgggcactacagctggacagatgtgctctgggttacctggtcttagttcagttgatatcaacaactttggtgattccattaatgagagtgagggaatacctttgaaaagaaggcgtgtgtcctttggtgggcacctaagacctgaactatttgatgaaaacttgcctcctaatacgcctctcaaaaggggagaagccccaaccaaaagaaagtctctggtaatgcacactccacctgtcctgaagaaaatcatcaaggaacagcctcaaccatcaggaaaacaagagtcaggttcagaaatccatgtggaagtgaaggcacaaagcttggttataagccctccagctcctagtcctaggaaaactccagttgccagtgatcaacgccgtaggtcctgcaaaacagcccctgcttccagcagcaaatctcagacagaggttcctaagagaggaggagaaagagtggcaacctgccttcaaaagagagtgtctatcagccgaagtcaacatgatattttacagatgatatgttccaaaagaagaagtggtgcttcggaagcaaatctgattgttgcaaaatcatgggcagatgtagtaaaacttggtgcaaaacaaacacaaactaaagtcataaaacatggtcctcaaaggtcaatgaacaaaaggcaaagaagacctgctactccaaagaagcctgtgggcgaagttcacagtcaatttagtacaggccacgcaaactctccttgtaccataataatagggaaagctcatactgaaaaagtacatgtgcctgctcgaccctacagagtgctcaacaacttcatttccaaccaaaaaatggactttaaggaagatctttcaggaatagctgaaatgttcaagaccccagtgaaggagcaaccgcagttgacaagcacatgtcacatcgctatttcaaattcagagaatttgcttggaaaacagtttcaaggaactgattcaggagaagaacctctgctccccacctcagagagttttggaggaaatgtgttcttcagtgcacagaatgcagcaaaacagccatctgataaatgctctgcaagccctcccttaagacggcagtgtattagagaaaatggaaacgtagcaaaaacgcccaggaacacctacaaaatgacttctctggagacaaaaacttcagatactgagacagagccttcaaaaacagtatccactgtaaacaggtcaggaaggtctacagagttcaggaatatacagaagctacctgtggaaagtaagagtgaagaaacaaatacagaaattgttgagtgcatcctaaaaagaggtcagaaggcaacactactacaacaaaggagagaaggagagatgaaggaaatagaaagaccttttgagacatataaggaaaatattgaattaaaagaaaacgatgaaaagatgaaagcaatgaagagatcaagaacttgggggcagaaatgtgcaccaatgtctgacctgacagacctcaagagcttgcctgatacagaactcatgaaagacacggcacgtggccagaatctcctccaaacccaagatcatgccaaggcaccaaagagtgagaaaggcaaaatcactaaaatgccctgccagtcattacaaccagaaccaataaacaccccaacacacacaaaacaacagttgaaggcatccctggggaaagtaggtgtgaaagaagagctcctagcagtcggcaagttcacacggacgtcaggggagaccacgcacacgcacagagagccagcaggagatggcaagagcatcagaacgtttaaggagtctccaaagcagatcctggacccagcagcccgtgtaactggaatgaagaagtggccaagaacgcctaaggaagaggcccagtcactagaagacctggctggcttcaaagagctcttccagacaccaggtccctctgaggaatcaatgactgatgagaaaactaccaaaatagcctgcaaatctccaccaccagaatcagtggacactccaacaagcacaaagcaatggcctaagagaagtctcaggaaagcagatgtagaggaagaattcttagcactcaggaaactaacaccatcagcagggaaagccatgcttacgcccaaaccagcaggaggtgatgagaaagacattaaagcatttatgggaactccagtgcagaaactggacctggcaggaactttacctggcagcaaaagacagctacagactcctaaggaaaaggcccaggctctagaagacctggctggctttaaagagctcttccagactcctggtcacaccgaggaattagtggctgctggtaaaaccactaaaataccctgcgactctccacagtcagacccagtggacaccccaacaagcacaaagcaacgacccaagagaagtatcaggaaagcagatgtagagggagaactcttagcgtgcaggaatctaatgccatcagcaggcaaagccatgcacacgcctaaaccatcagtaggtgaagagaaagacatcatcatatttgtgggaactccagtgcagaaactggacctgacagagaacttaaccggcagcaagagacggccacaaactcctaaggaagaggcccaggctctggaagacctgactggctttaaagagctcttccagacccctggtcatactgaagaagcagtggctgctggcaaaactactaaaatgccctgcgaatcttctccaccagaatcagcagacaccccaacaagcacaagaaggcagcccaagacacctttggagaaaagggacgtacagaaggagctctcagccctgaagaagctcacacagacatcaggggaaaccacacacacagataaagtaccaggaggtgaggataaaagcatcaacgcgtttagggaaactgcaaaacagaaactggacccagcagcaagtgtaactggtagcaagaggcacccaaaaactaaggaaaaggcccaacccctagaagacctggctggctggaaagagctcttccagacaccagtatgcactgacaagcccacgactcacgagaaaactaccaaaatagcctgcagatcacaaccagacccagtggacacaccaacaagctccaagccacagtccaagagaagtctcaggaaagtggacgtagaagaagaattcttcgcactcaggaaacgaacaccatcagcaggcaaagccatgcacacacccaaaccagcagtaagtggtgagaaaaacatctacgcatttatgggaactccagtgcagaaactggacctgacagagaacttaactggcagcaagagacggctacaaactcctaaggaaaaggcccaggctctagaagacctggctggctttaaagagctcttccagacacgaggtcacactgaggaatcaatgactaacgataaaactgccaaagtagcctgcaaatcttcacaaccagacctagacaaaaacccagcaagctccaagcgacggctcaagacatccctggggaaagtgggcgtgaaagaagagctcctagcagttggcaagctcacacagacatcaggagagactacacacacacacacagagccaacaggagatggtaagagcatgaaagcatttatggagtctccaaagcagatcttagactcagcagcaagtctaactggcagcaagaggcagctgagaactcctaagggaaagtctgaagtccctgaagacctggccggcttcatcgagctcttccagacaccaagtcacactaaggaatcaatgactaatgaaaaaactaccaaagtatcctacagagcttcacagccagacctagtggacaccccaacaagctccaagccacagcccaagagaagtctcaggaaagcagacactgaagaagaatttttagcatttaggaaacaaacgccatcagcaggcaaagccatgcacacacccaaaccagcagtaggtgaagagaaagacatcaacacgtttttgggaactccagtgcagaaactggaccagccaggaaatttacctggcagcaatagacggctacaaactcgtaaggaaaaggcccaggctctagaagaactgactggcttcagagagcttttccagacaccatgcactgataaccccacagctgatgagaaaactaccaaaaaaatactctgcaaatctccgcaatcagacccagcggacaccccaacaaacacaaagcaacggcccaagagaagcctcaagaaagcagacgtagaggaagaatttttagcattcaggaaactaacaccatcagcaggcaaagccatgcacacgcctaaagcagcagtaggtgaagagaaagacatcaacacatttgtggggactccagtggagaaactggacctgctaggaaatttacctggcagcaagagacggccacaaactcctaaagaaaaggccaaggctctagaagatctggctggcttcaaagagctcttccagacaccaggtcacactgaggaatcaatgaccgatgacaaaatcacagaagtatcctgcaaatctccacaaccagacccagtcaaaaccccaacaagctccaagcaacgactcaagatatccttggggaaagtaggtgtgaaagaagaggtcctaccagtcggcaagctcacacagacgtcagggaagaccacacagacacacagagagacagcaggagatggaaagagcatcaaagcgtttaaggaatctgcaaagcagatgctggacccagcaaactatggaactgggatggagaggtggccaagaacacctaaggaagaggcccaatcactagaagacctggccggcttcaaagagctcttccagacaccagaccacactgaggaatcaacaactgatgacaaaactaccaaaatagcctgcaaatctccaccaccagaatcaatggacactccaacaagcacaaggaggcggcccaaaacacctttggggaaaagggatatagtggaagagctctcagccctgaagcagctcacacagaccacacacacagacaaagtaccaggagatgaggataaaggcatcaacgtgttcagggaaactgcaaaacagaaactggacccagcagcaagtgtaactggtagcaagaggcagccaagaactcctaagggaaaagcccaacccctagaagacttggctggcttgaaagagctcttccagacaccagtatgcactgacaagcccacgactcacgagaaaactaccaaaatagcctgcagatctccacaaccagacccagtgggtaccccaacaatcttcaagccacagtccaagagaagtctcaggaaagcagacgtagaggaagaatccttagcactcaggaaacgaacaccatcagtagggaaagctatggacacacccaaaccagcaggaggtgatgagaaagacatgaaagcatttatgggaactccagtgcagaaattggacctgccaggaaatttacctggcagcaaaagatggccacaaactcctaaggaaaaggcccaggctctagaagacctggctggcttcaaagagctcttccagacaccaggcactgacaagcccacgactgatgagaaaactaccaaaatagcctgcaaatctccacaaccagacccagtggacaccccagcaagcacaaagcaacggcccaagagaaacctcaggaaagcagacgtagaggaagaatttttagcactcaggaaacgaacaccatcagcaggcaaagccatggacaccccaaaaccagcagtaagtgatgagaaaaatatcaacacatttgtggaaactccagtgcagaaactggacctgctaggaaatttacctggcagcaagagacagccacagactcctaaggaaaaggctgaggctctagaggacctggttggcttcaaagaactcttccagacaccaggtcacactgaggaatcaatgactgatgacaaaatcacagaagtatcctgtaaatctccacagccagagtcattcaaaacctcaagaagctccaagcaaaggctcaagatacccctggtgaaagtggacatgaaagaagagcccctagcagtcagcaagctcacacggacatcaggggagactacgcaaacacacacagagccaacaggagatagtaagagcatcaaagcgtttaaggagtctccaaagcagatcctggacccagcagcaagtgtaactggtagcaggaggcagctgagaactcgtaaggaaaaggcccgtgctctagaagacctggttgacttcaaagagctcttctcagcaccaggtcacactgaagagtcaatgactattgacaaaaacacaaaaattccctgcaaatctcccccaccagaactaacagacactgccacgagcacaaagagatgccccaagacacgtcccaggaaagaagtaaaagaggagctctcagcagttgagaggctcacgcaaacatcagggcaaagcacacacacacacaaagaaccagcaagcggtgatgagggcatcaaagtattgaagcaacgtgcaaagaagaaaccaaacccagtagaagaggaacccagcaggagaaggccaagagcacctaaggaaaaggcccaacccctggaagacctggccggcttcacagagctctctgaaacatcaggtcacactcaggaatcactgactgctggcaaagccactaaaataccctgcgaatctcccccactagaagtggtagacaccacagcaagcacaaagaggcatctcaggacacgtgtgcagaaggtacaagtaaaagaagagccttcagcagtcaagttcacacaaacatcaggggaaaccacggatgcagacaaagaaccagcaggtgaagataaaggcatcaaagcattgaaggaatctgcaaaacagacaccggctccagcagcaagtgtaactggcagcaggagacggccaagagcacccagggaaagtgcccaagccatagaagacctagctggcttcaaagacccagcagcaggtcacactgaagaatcaatgactgatgacaaaaccactaaaataccctgcaaatcatcaccagaactagaagacaccgcaacaagctcaaagagacggcccaggacacgtgcccagaaagtagaagtgaaggaggagctgttagcagttggcaagctcacacaaacctcaggggagaccacgcacaccgacaaagagccggtaggtgagggcaaaggcacgaaagcatttaagcaacctgcaaagcggaacgtggacgcagaagatgtaattggcagcaggagacagccaagagcacctaaggaaaaggcccaacccctggaagacctggccagcttccaagagctctctcaaacaccaggccacactgaggaactggcaaatggtgctgctgatagctttacaagcgctccaaagcaaacacctgacagtggaaaacctctaaaaatatccagaagagttcttcgggcccctaaagtagaacccgtgggagacgtggtaagcaccagagaccctgtaaaatcacaaagcaaaagcaacacttccctgcccccactgcccttcaagaggggaggtggcaaagatggaagcgtcacgggaaccaagaggctgcgctgcatgccagcaccagaggaaattgtggaggagctgccagccagcaagaagcagagggttgctcccagggcaagaggcaaatcatccgaacccgtggtcatcatgaagagaagtttgaggacttctgcaaaaagaattgaacctgcggaagagctgaacagcaacgacatgaaaaccaacaaagaggaacacaaattacaagactcggtccctgaaaataagggaatatccctgcgctccagacgccaagataagactgaggcagaacagcaaataactgaggtctttgtattagcagaaagaatagaaataaacagaaatgaaaagaagcccatgaagacctccccagagatggacattcagaatccagatgatggagcccggaaacccatacctagagacaaagtcactgagaacaaaaggtgcttgaggtctgctagacagaatgagagctcccagcctaaggtggcagaggagagcggagggcagaagagtgcgaaggttctcatgcagaatcagaaagggaaaggagaagcaggaaattcagactccatgtgcctgagatcaagaaagacaaaaagccagcctgcagcaagcactttggagagcaaatctgtgcagagagtaacgcggagtgtcaagaggtgtgcagaaaatccaaagaaggctgaggacaatgtgtgtgtcaagaaaataacaaccagaagtcatagggacagtgaagatatttgacagaaaaatcgaactgggaaaaatataataaagttagttttgtgataagttctagtgcagtttttgtcataaattacaagtgaattctgtaagtaaggctgtcagtctgcttaagggaagaaaactttggatttgctgggtctgaatcggcttcataaactccactgggagcactgctgggctcctggactgagaatagttgaacaccgggggctttgtgaaggagtctgggccaaggtttgccctcagctttgcagaatgaagccttgaggtctgtcaccacccacagccaccctacagcagccttaactgtgacacttgccacactgtgtcgtcgtttgtttgcctatgttctccagggcacggtggcaggaacaactatcctcgtctgtcccaacactgagcaggcactcggtaaacacgaatgaatggataagcgcacggatgaatggagcttacaagatctgtctttccaatggccgggggcatttggtccccaaattaaggctattggacatctgcacaggacagtcctatttttgatgtcctttcctttctgaaaataaagttttgtgctttggagaatgactcgtgagcacatctttagggaccaagagtgactttctgtaaggagtgactcgtggcttgccttggtctcttgggaatacttttctaactagggttgctctcacctgagacattctccacccgcggaatctcagggtcccaggctgtgggccatcacgacctcaaactggctcctaatctccagctttcctgtcattgaaagcttcggaagtttactggctctgctcccgcctgttttctttctgactctatctggcagcccgatgccacccagtacaggaagtgacaccagtactctgtaaagcatcatcatccttggagagactgagcactcagcaccttcagccacgatttcaggatcgcttccttgtgagccgctgcctccgaaatctcctttgaagcccagacatctttctccagcttcagacttgtagatataactcgttcatcttcatttactttccactttgccccctgtcctctctgtgttccccaaatcagagaatagcccgccatcccccagatcacctgtctggattcctccccattcacccaccttgccaggtgcaggtgaggatggtgcaccagacagggtagctgtcccccaaaatgtgccctgtgcgggcagtgccctgtctccacgtttgtttccccagtgtctggcggggagccaggtgacatcataaatacttgctgaatgaatgcagaaatcagcggtactgacttgtactatattggctgccatgatagggttctcacagcgtcatccatgatcgtaagggagaatgacattctgcttgagggagggaatagaaaggggcagggaggggacatctgagggcttcacagggctgcaaagggtacagggattgcaccagggcagaacaggggagggtgttcaaggaagagtggctcttagcagaggcactttggaaggtgtgaggcataaatgcttccttctacgtaggccaacctcaaaactttcagtaggaatgttgctatgatcaagttgttctaacactttagacttagtagtaattatgaacctcacatagaaaaatttcatccagccatatgcctgtggagtggaatattctgtttagtagaaaaatcctttagagttcagctctaaccagaaatcttgctgaagtatgtcagcaccttttctcaccctggtaagtacagtatttcaagagcacgctaagggtggttttcattttacagggctgttgatgatgggttaaaaatgttcatttaagggctacccccgtgtttaatagatgaacaccacttctacacaaccctccttggtactgggggagggagagatctgacaaatactgcccattcccctaggctgactggatttgagaacaaatacccacccatttccaccatggtatggtaacttctctgagcttcagtttccaagtgaatttccatgtaataggacattcccattaaatacaagctgtttttactttttcgcctcccagggcctgtgcgatctggtcccccagcctctcttgggctttcttacactaactctgtacctaccatctcctgcctcccttaggcaggcacctccaaccaccacacactccctgctgttttccctgcctggaactttcccaccagccccaccaagatcatttcatccagtcctgagctcagcttaagggaggcttcttgcctgtgggttccctcacccccatgcctgtcctccaggctggggcaggttcttagtttgcctggaattgttctgtacctctttgtagcacgtagtgttgtgaaactaagccactaattgagtttctggctcccctcctggggttgtaagttttgttcattcatgagggccgactgtatttcctggttactgtatcccagtgaccagccacaggagatgtccaataaagtatgtgatgaaatggtcttaaaaaaaaaaaaaaaaaaaaaa

SEQ ID NO: 2633 - protein, 2896 aa, Homo sapiens
MWPTRRLVTIKRSGVDGPHFPLSLSTCLFGRGIECDIRIQLPVVSKQHCKIEIHEQEAILHNFSSTNPTQVNGSVIDEPVRLKHGDVITIIDRSFRYENESLQNGRKSTEFPRKIREQEPARRVSRSSFSSDPDESEGIPLKRRRVSFGGHLRPELFDENLPPNTPLKRGEAPTKRKSLVMHTPPVLKKIIKEQPQPSGKQESGSEIHVEVKAQSLVISPPAPSPRKTPVASDQRRRSCKTAPASSSKSQTEVPKRGGERVATCLQKRVSISRSQHDILQMICSKRRSGASEANLIVAKSWADVVKLGAKQTQTKVIKHGPQRSMNKRQRRPATPKKPVGEVHSQFSTGHANSPCTIIIGKAHTEKVHVPARPYRVLNNFISNQKMDFKEDLSGIAEMFKTPVKEQPQLTSTCHIAISNSENLLGKQFQGTDSGEEPLLPTSESFGGNVFFSAQNAAKQPSDKCSASPPLRRQCIRENGNVAKTPRNTYKMTSLETKTSDTETEPSKTVSTVNRSGRSTEFRNIQKLPVESKSEETNTEIVECILKRGQKATLLQQRREGEMKEIERPFETYKENIELKENDEKMKAMKRSRTWGQKCAPMSDLTDLKSLPDTELMKDTARGQNLLQTQDHAKAPKSEKGKITKMPCQSLQPEPINTPTHTKQQLKASLGKVGVKEELLAVGKFTRTSGETTHTHREPAGDGKSIRTFKESPKQILDPAARVTGMKKWPRTPKEEAQSLEDLAGFKELFQTPGPSEESMTDEKTTKIACKSPPPESVDTPTSTKQWPKRSLRKADVEEEFLALRKLTPSAGKAMLTPKPAGGDEKDIKAFMGTPVQKLDLAGTLPGSKRQLQTPKEKAQALEDLAGFKELFQTPGHTEELVAAGKTTKIPCDSPQSDPVDTPTSTKQRPKRSIRKADVEGELLACRNLMPSAGKAMHTPKPSVGEEKDIIIFVGTPVQKLDLTENLTGSKRRPQTPKEEAQALEDLTGFKELFQTPGHTEEAVAAGKTTKMPCESSPPESADTPTSTRRQPKTPLEKRDVQKELSALKKLTQTSGETTHTDKVPGGEDKSINAFRETAKQKLDPAASVTGSKRHPKTKEKAQPLEDLAGWKELFQTPVCTDKPTTHEKTTKIACRSQPDPVDTPTSSKPQSKRSLRKVDVEEEFFALRKRTPSAGKAMHTPKPAVSGEKNIYAFMGTPVQKLDLTENLTGSKRRLQTPKEKAQALEDLAGFKELFQTRGHTEESMTNDKTAKVACKSSQPDLDKNPASSKRRLKTSLGKVGVKEELLAVGKLTQTSGETTHTHTEPTGDGKSMKAFMESPKQILDSAASLTGSKRQLRTPKGKSEVPEDLAGFIELFQTPSHTKESMTNEKTTKVSYRASQPDLVDTPTSSKPQPKRSLRKADTEEEFLAFRKQTPSAGKAMHTPKPAVGEEKDINTFLGTPVQKLDQPGNLPGSNRRLQTRKEKAQALEELTGFRELFQTPCTDNPTADEKTTKKILCKSPQSDPADTPTNTKQRPKRSLKKADVEEEFLAFRKLTPSAGKAMHTPKAAVGEEKDINTFVGTPVEKLDLLGNLPGSKRRPQTPKEKAKALEDLAGFKELFQTPGHTEESMTDDKITEVSCKSPQPDPVKTPTSSKQRLKISLGKVGVKEEVLPVGKLTQTSGKTTQTHRETAGDGKSIKAFKESAKQMLDPANYGTGMERWPRTPKEEAQSLEDLAGFKELFQTPDHTEESTTDDKTTKIACKSPPPESMDTPTSTRRRPKTPLGKRDIVEELSALKQLTQTTHTDKVPGDEDKGINVFRETAKQKLDPAASVTGSKRQPRTPKGKAQPLEDLAGLKELFQTPVCTDKPTTHEKTTKIACRSPQPDPVGTPTIFKPQSKRSLRKADVEEESLALRKRTPSVGKAMDTPKPAGGDEKDMKAFMGTPVQKLDLPGNLPGSKRWPQTPKEKAQALEDLAGFKELFQTPGTDKPTTDEKTTKIACKSPQPDPVDTPASTKQRPKRNLRKADVEEEFLALRKRTPSAGKAMDTPKPAVSDEKNINTFVETPVQKLDLLGNLPGSKRQPQTPKEKAEALEDLVGFKELFQTPGHTEESMTDDKITEVSCKSPQPESFKTSRSSKQRLKIPLVKVDMKEEPLAVSKLTRTSGETTQTHTEPTGDSKSIKAFKESPKQILDPAASVTGSRRQLRTRKEKARALEDLVDFKELFSAPGHTEESMTIDKNTKIPCKSPPPELTDTATSTKRCPKTRPRKEVKEELSAVERLTQTSGQSTHTHKEPASGDEGIKVLKQRAKKKPNPVEEEPSRRRPRAPKEKAQPLEDLAGFTELSETSGHTQESLTAGKATKIPCESPPLEVVDTTASTKRHLRTRVQKVQVKEEPSAVKFTQTSGETTDADKEPAGEDKGIKALKESAKQTPAPAASVTGSRRRPRAPRESAQAIEDLAGFKDPAAGHTEESMTDDKTTKIPCKSSPELEDTATSSKRRPRTRAQKVEVKEELLAVGKLTQTSGETTHTDKEPVGEGKGTKAFKQPAKRNVDAEDVIGSRRQPRAPKEKAQPLEDLASFQELSQTPGHTEELANGAADSFTSAPKQTPDSGKPLKISRRVLRAPKVEPVGDVVSTRDPVKSQSKSNTSLPPLPFKRGGGKDGSVTGTKRLRCMPAPEEIVEELPASKKQRVAPRARGKSSEPVVIMKRSLRTSAKRIEPAEELNSNDMKTNKEEHKLQDSVPENKGISLRSRRQDKTEAEQQITEVFVLAERIEINRNEKKPMKTSPEMDIQNPDDGARKPIPRDKVTENKRCLRSARQNESSQPKVAEESGGQKSAKVLMQNQKGKGEAGNSDSMCLRSRKTKSQPAASTLESKSVQRVTRSVKRCAENPKKAEDNVCVKKITTRSHRDSEDI

SEQ ID NO: 2634 - DNA, 588 bp, Homo sapiens
tgatcatcttttgtttgtcatggatttccactgtctgaaacggctctgagcacgcttgaagccctcggtttccctgttcgctttgaatgtttcagtttagttattgatacaatgtcagccatggctaaaaagtaacagtcttgactctaccgagtaacagcacaaaaacagagtgagggctcaggaaaacaaaacaaaggcttcctccttaaaaaaaagacaaaaaaaaaaagctaagcatctgtggctgaaatctaactcagtggtactgtgaaaccttcctttacagcacaggaaaatttattttttaacagtcgtgagttacagtactttaacccctaaacagactctttaaaacaaccgtctcctttttaaaagctttttttccaaacattccatccgaaggatggatgctctacttgcacccagtgccatccaaatgttcaagtcaaaaatatttatacattttatacttagttcttttttttgtctgctaaaaatagtattgcaggctttggctttttttgacataaaatcacaatcgtgtacgatgctaacaatggaagcgactgatcggaatacgagccg

SEQ ID NO: 2635 - DNA, 3767 bp, Homo sapiens
gcggccgcagctccgtttccggtggctcgtcgcgctcgctcactccagctgcagccactctcgcccgtggctgcttcctccatcctggtattttttggagcttccatcctggttcttccaaagtgcccggacccaaaacaggaaagtgttgcggagataggaacatgggagagaaacaatctgggtaacatgaaagtgatgctggttgctaagggaaggcaacttgattctgtgggaagggctgtagctgatccatccgttgtctagatttgagtatgagcacagtggaagaggattctgacacagtaacagtagaaactgtgaactctgtgactttgactcaggacacagaagggaatctcattcttcactgccctcagaatgaagcggatgaaatagactcagaagatagtattgaacctccacataaaaggctttgtttgtcctctgaggatgatcagagtattgatgattctactccttgcatatcagttgttgcacttccactttcagaaaatgatcagagctttgaagtgaccatgactgcaaccacagaagtagcagatgatgaggttactgaggggactgtgacacagatacagattttgcagaatgagcaactagatgaaatatctcccttgggtaacgaggaagtttcagcagttagccaagcatggtttacaactaaagaagataaggattctctgactaataaaggacataaatggaagcaggggatgtggtccaaggaagaaattgatattttgatgaacaatattgaacgctatcttaaggcacgcggaataaaagatgctacagaaatcatctttgagatgtcaaaagacgaaagaaaagatttctacaggactatagcatggggtctgaaccggcctttgtttgcagtttatagaagagtgcttcgcatgtatgatgacagaaaccatgtgggaaaatatacacctgaagaaattgagaagctcaaggagctccggataaagcatggcaatgactgggcaacaataggggcggcgctaggaagaagtgcatcttctgtcaaagatcggtgccgactgatgaaggatacttgcaacacagggaagtggacagaagaagaagaaaagagacttgcagaagtggttcatgagttgacaagcactgagccaggtgacatagtcacacagggtgtgtcttgggcagctgtggctgaacgagtcggtacccgctcagaaaagcaatgtcgttctaaatggctcaactacctgaattggaaacagagtgggggtactgaatggaccaaggaagatgaaatcaatctcatcctcaggatagcagaacttgatgtagctgatgaaaatgacattaactgggatctgttagctgagggatggagtagtgtccgttcaccacaatggctacgaagtaaatggtggaccatcaaaaggcaaattgcaaaccataaggatgtttcgttccctgtcttaataaaaggtcttaaacagttacatgagaaccaaaaaaacaacccaacgcttttggagaataaatcaggatctggagttccaaacagtaataccaattccagtgtgcagcatgttcagataagagttgcccgcttggaagataatacagccatctcttctagccccatggcagcattgcagattccagtccagatcacccatgtttcttcagcagactctcctgctaccgttgactcagaaacaataacactaaacagtggaacactacagacatttgagattcttccctctttccatctacagcccactggcactccaggcacctacctacttcaaacaagctcaagccaaggccttcccctaactctgactgctagtcccacagtaaccctgacagctgctgctcctgcttctcctgaacagattattgttcatgctttatccccagaacatttgttgaacacaagtgataatgttacagtgcagtgtcacacaccaagagtcatcattcagactgttgccacagaggacatcacttcttccatatcccaagcagaactgacagtcgatagtgatattcagtcatctgattttcctgagcctccagacgccctagaagcagacactttcccagatgaaattcatcaccctaagatgactgtggagccatcatttaatgatgctcatgtatccaaattcagtgaccaaaatagcacagaactgatgaatagtgttatggtcagaacagaagaagaaatctctgacaccgaccttaaacaagaggaatcaccctctgatttagccagtgcttatgttactgagggtttagagtctcccactatagaagaacaagttgatcaaacaattgatgatgaaacaatacttatcgttccttcaccacatggctttatccaggcatctgatgttatagatactgaatctgtcttgcctttgacaacactaacagatcccatactccaacatcatcaggaagaatcaaatatcattggatcatccttgggcagtcctgtttcagaagattcaaaggatgtcgaagatttggtaaactgtcattagaataattcttagaaataggcagttcaagcaaagaaggcacactgttaattacaacctcttcaaagaaataggagcaaacccccaagaggcttaatttaccaatttaaatagccacagtccttaagccacacacattgttgctgctatgactttttacctcctttaaacacatcatctgaggttgagttttatgacagtatgtagttgagtggaggctgggagttttaagcataaatccctgtttagtgttacatgggaataaggaatttcattcacttcagccactaagaaaagtttagaatcacgaaagcttaactgctgtggtttaaagtacagtttctctaaagatcagacatggcactgtctcctctcaagcctggttgtagttcagatgagtcttttcaacatggtcttcaacatggtctagagcttaccagtgatcttctgatcttcaagaagactaagtttgagacttgaccagcatacaagtatagagacctaggaggtggtcttgtggtggtacatttggttaacccattgctggcagtgggagctgatttaggcagggtaaacaggaaagcattaaaagttaaaattcactacaggttttttgttacttttaaagggaatatggataagcatagtaacaaaacccaccagaatctaagcagttttcaccccctcagaaaccactgtcattagtttacaaagttagcactttgaagtaaaactaaatgaggaaggaagtaatgttacctatccttgataccatgaccatttattagatgttttgctatataaattaccgagagaatagtttgtcatccacttagtgtgttagctggtggggtacaatataacctctcatctcaggctattttaaaaaaacaatatttgcttctataacaaaaggaaacaaatctaagaatcattcctgtactacagaagggttaaggcaaaggtagccttttgggctttttaatgaatatgacccctatagaaaagtcaagaaaaaaaaacccttgtataaattattttatttattattgtaattagatcttcacaaagttgtcttttcactgtgttttgtcaacgtgaaattaaattgtagttataagcaaaagttggttgcctagggaacaattgtatattcagtttaacagaaataaaagaatatttgtcttaaaaaaaaaaaaaaaaaaactcgag

SEQ ID NO: 2636 - protein, 760 aa, Homo sapiens
MSTVEEDSDTVTVETVNSVTLTQDTEGNLILHCPQNEADEIDSEDSIEPPHKRLCLSSEDDQSIDDSTPCISVVALPLSENDQSFEVTMTATTEVADDEVTEGTVTQIQILQNEQLDEISPLGNEEVSAVSQAWFTTKEDKDSLTNKGHKWKQGMWSKEEIDILMNNIERYLKARGIKDATEIIFEMSKDERKDFYRTIAWGLNRPLFAVYRRVLRMYDDRNHVGKYTPEEIEKLKELRIKHGNDWATIGAALGRSASSVKDRCRLMKDTCNTGKWTEEEEKRLAEVVHELTSTEPGDIVTQGVSWAAVAERVGTRSEKQCRSKWLNYLNWKQSGGTEWTKEDEINLILRIAELDVADENDINWDLLAEGWSSVRSPQWLRSKWWTIKRQIANHKDVSFPVLIKGLKQLHENQKNNPTLLENKSGSGVPNSNTNSSVQHVQIRVARLEDNTAISSSPMAALQIPVQITHVSSADSPATVDSETITLNSGTLQTFEILPSFHLQPTGTPGTYLLQTSSSQGLPLTLTASPTVTLTAAAPASPEQIIVHALSPEHLLNTSDNVTVQCHTPRVIIQTVATEDITSSISQAELTVDSDIQSSDFPEPPDALEADTFPDEIHHPKMTVEPSFNDAHVSKFSDQNSTELMNSVMVRTEEEISDTDLKQEESPSDLASAYVTEGLESPTIEEQVDQTIDDETILIVPSPHGFIQASDVIDTESVLPLTTLTDPILQHHQEESNIIGSSLGSPVSEDSKDVEDLVNCH

SEQ ID NO: 2637 - DNA, 3349 bp, Homo sapiens
acttcctgccgggctgcgggcgcctgagcgctcttcagcgtttgcgcggcggctgcgcgtctctctcggctcccgcttcctttgaccgcctcccccccccggcccggcggcgcccgcctcctccacggccactccgcctcttccctcccttcgtcccttcttcctctcccttttttccttcttccttcccctcctcgccgccaccgcccaggaccgccggccgggggacgagtccggagcagcagccagcagcagccaggtggagttttgctcttgtcgcccaggctggagtgcagtggcgtgatctcggctcactgcaacctccacctcccaggtcagcgattttcccacttcagcctcccgataagctgagattacaggagtttattaaccacttaacctctcagaactgaacaaagacaacattgttcctggaacgccctctttttaaaaaagaaagcataacccctactgtagaactaaatgcactgtgcatgaaacttggaaaaaaaccaatgtataagcctgttgacccttactctcggatgcagtccacctataactacaacatgagaggaggtgcttatcccccgaggtacttttacccatttccagttccacctttactttatcaagtggaactttctgtgggaggacagcaatttaatggcaaaggaaagacaagacaggctgcgaaacacgatgctgctgccaaagcgttgaggatcctgcagaatgagcccctgccagagaggctggaggtgaatggaagagaatccgaagaagaaaatctcaataaatctgaaataagtcaagtgtttgagattgcacttaaacggaacttgcctgtgaatttcgaggtggcccgggagagtggcccaccccacatgaagaactttgtgaccaaggtttcggttggggagtttgtgggggaaggtgaagggaaaagcaagaagatttcaaagaaaaatgccgccatagctgttcttgaggagctgaagaagttaccgcccctgcctgcagttgaacgagtaaagcctagaatcaaaaagaaaacaaaacccatagtcaagccacagacaagcccagaatatggccaggggatcaatccgattagccgactggcccagatccagcaggcaaaaaaggagaaggagccagagtacacgctcctcacagagcgaggcctcccgcgccgcagggagtttgtgatgcaggtgaaggttggaaaccacactgcagaaggaacgggcaccaacaagaaggtggccaagcgcaatgcagccgagaacatgctggagatccttggtttcaaagtcccgcagcggcagcccaccaaacccgcactcaagtcagaggagaagacacccataaagaaaccaggggatggaagaaaagtaaccttttttgaacctggctctggggatgaaaatgggactagtaataaagaggatgagttcaggatgccttatctaagtcatcagcagctgcctgctggaattcttcccatggtgcccgaggtcgcccaggctgtaggagttagtcaaggacatcacaccaaagattttaccagggcagctccgaatcctgccaaggccacggtaactgccatgatagcccgagagttgttgtatgggggcacctcgcccacagccgagaccattttaaagaataacatctcttcaggccacgtaccccatggacctctcacgagaccctctgagcaactggactatctttccagagtccagggattccaggttgaatacaaagacttccccaaaaacaacaagaacgaatttgtatctcttatcaattgctcctctcagccacctctgatcagccatggtatcggcaaggatgtggagtcctgccatgatatggctgcgctgaacatcttaaagttgctgtctgagttggaccaacaaagtacagagatgccaagaacaggaaacggaccaatgtctgtgtgtgggaggtgctgaaccttttctggccatgaaccattataaaatcccaacatatatactgaaaatactgaaactgctttgaaaatttggaatttctgatacctccagtgggccgagagacacggtgggtaaaggatgtgggcagcagcagggaagacaacagaaacacaaggaggcggctgtggccggctggactgtgctggggtttgttgtgatggccactcggtgacctggcggtccctacgcaatagcagctgcctgtggggaagaagggctgcccagccagctggttctcccgggacaccagcagatccacaccctgggcacctccgtgtttggtcttttttttcccctgtgtgaaagaagaaacggcacgaccccttctcaagctggctcactcagacacattgggacaaaccctggacagccatgccagagagaggcctttgaccggccccagagctaaaagcaccagagaaaatcaaatgcttcctactcagcgtgacccaacttttctagtgtgccacggccccaccacctcctgcagtacccacaccatcaccactgctttctcttccaacagtgatctgtattcttagtttcattattttcttttgattgatatgacactatataaaattttcatttgagaatttctcaattgtatctagttaaatagcacagtttggaaacttgtctgagactgactttatcaataatctaaccgacaaagatcatatccatgtgtatgtggttagacatttttatttcattgactaacccaggacagtttcagtgatgcaaattgtgtgccctctggttcagctgaaacagtcctggactttcaaaaaccttgaataagtctcccacagttgtataaattggacaatttaggaattttaaactttagatgatcatttggttccatttttatttcatttttatttttgttaatgcaaacaggacttaaatgaactttgatctctgttttaaagattattaaaaaacattgtgtatctatacatatggctcttgaggacttagctttcactacactacaggatatgatctccatgtagtccatataaacctgcagagtgattttccagagtgctcgatactgttaattacatctccattagggctgaaaagaatgacctacgtttctgtatacagctgtgttgcttttgatgttgtgttactgtacacagaagtgtgtgcactgaggctctgcgtgtggtccgtatggaaaacctggtagccctgcgagttaagtactgcttccattcattgtttacgctggaatttttctccccatggaatgtaagtaaaacttaagtgtttgtcatcaataaatggtaatactaaaaaaaaaaaaa

SEQ ID NO: 2638 - protein, 496 aa, Homo sapiens
MKLGKKPMYKPVDPYSRMQSTYNYNMRGGAYPPRYFYPFPVPPLLYQVELSVGGQQFNGKGKTRQAAKHDAAAKALRILQNEPLPERLEVNGRESEEENLNKSEISQVFEIALKRNLPVNFEVARESGPPHMKNFVTKVSVGEFVGEGEGKSKKISKKNAAIAVLEELKKLPPLPAVERVKPRIKKKTKPIVKPQTSPEYGQGINPISRLAQIQQAKKEKEPEYTLLTERGLPRRREFVMQVKVGNHTAEGTGTNKKVAKRNAAENMLEILGFKVPQRQPTKPALKSEEKTPIKKPGDGRKVTFFEPGSGDENGTSNKEDEFRMPYLSHQQLPAGILPMVPEVAQAVGVSQGHHTKDFTRAAPNPAKATVTAMIARELLYGGTSPTAETILKNNISSGHVPHGPLTRPSEQLDYLSRVQGFQVEYKDFPKNNKNEFVSLINCSSQPPLISHGIGKDVESCHDMAALNILKLLSELDQQSTEMPRTGNGPMSVCGRC

SEQ ID NO: 2639 - DNA, 3217 bp, Homo sapiens
acttcctgccgggctgcgggcgcctgagcgctcttcagcgtttgcgcggcggctgcgcgtctctctcggctcccgcttcctttgaccgcctcccccccccggcccggcggcgcccgcctcctccacggccactccgcctcttccctcccttcgtcccttcttcctctcccttttttccttcttccttcccctcctcgccgccaccgcccaggaccgccggccgggggacgagtccggagcagcagccagagtttattaaccacttaacctctcagaactgaacaaagacaacattgttcctggaacgccctctttttaaaaaagaaagcataacccctactgtagaactaaatgcactgtgcatgaaacttggaaaaaaaccaatgtataagcctgttgacccttactctcggatgcagtccacctataactacaacatgagaggaggtgcttatcccccgaggtacttttacccatttccagttccacctttactttatcaagtggaactttctgtgggaggacagcaatttaatggcaaaggaaagacaagacaggctgcgaaacacgatgctgctgccaaagcgttgaggatcctgcagaatgagcccctgccagagaggctggaggtgaatggaagagaatccgaagaagaaaatctcaataaatctgaaataagtcaagtgtttgagattgcacttaaacggaacttgcctgtgaatttcgaggtggcccgggagagtggcccaccccacatgaagaactttgtgaccaaggtttcggttggggagtttgtgggggaaggtgaagggaaaagcaagaagatttcaaagaaaaatgccgccatagctgttcttgaggagctgaagaagttaccgcccctgcctgcagttgaacgagtaaagcctagaatcaaaaagaaaacaaaacccatagtcaagccacagacaagcccagaatatggccaggggatcaatccgattagccgactggcccagatccagcaggcaaaaaaggagaaggagccagagtacacgctcctcacagagcgaggcctcccgcgccgcagggagtttgtgatgcaggtgaaggttggaaaccacactgcagaaggaacgggcaccaacaagaaggtggccaagcgcaatgcagccgagaacatgctggagatccttggtttcaaagtcccgcagcggcagcccaccaaacccgcactcaagtcagaggagaagacacccataaagaaaccaggggatggaagaaaagtaaccttttttgaacctggctctggggatgaaaatgggactagtaataaagaggatgagttcaggatgccttatctaagtcatcagcagctgcctgctggaattcttcccatggtgcccgaggtcgcccaggctgtaggagttagtcaaggacatcacaccaaagattttaccagggcagctccgaatcctgccaaggccacggtaactgccatgatagcccgagagttgttgtatgggggcacctcgcccacagccgagaccattttaaagaataacatctcttcaggccacgtaccccatggacctctcacgagaccctctgagcaactggactatctttccagagtccagggattccaggttgaatacaaagacttccccaaaaacaacaagaacgaatttgtatctcttatcaattgctcctctcagccacctctgatcagccatggtatcggcaaggatgtggagtcctgccatgatatggctgcgctgaacatcttaaagttgctgtctgagttggaccaacaaagtacagagatgccaagaacaggaaacggaccaatgtctgtgtgtgggaggtgctgaaccttttctggccatgaaccattataaaatcccaacatatatactgaaaatactgaaactgctttgaaaatttggaatttctgatacctccagtgggccgagagacacggtgggtaaaggatgtgggcagcagcagggaagacaacagaaacacaaggaggcggctgtggccggctggactgtgctggggtttgttgtgatggccactcggtgacctggcggtccctacgcaatagcagctgcctgtggggaagaagggctgcccagccagctggttctcccgggacaccagcagatccacaccctgggcacctccgtgtttggtcttttttttcccctgtgtgaaagaagaaacggcacgaccccttctcaagctggctcactcagacacattgggacaaaccctggacagccatgccagagagaggcctttgaccggccccagagctaaaagcaccagagaaaatcaaatgcttcctactcagcgtgacccaacttttctagtgtgccacggccccaccacctcctgcagtacccacaccatcaccactgctttctcttccaacagtgatctgtattcttagtttcattattttcttttgattgatatgacactatataaaattttcatttgagaatttctcaattgtatctagttaaatagcacagtttggaaacttgtctgagactgactttatcaataatctaaccgacaaagatcatatccatgtgtatgtggttagacatttttatttcattgactaacccaggacagtttcagtgatgcaaattgtgtgccctctggttcagctgaaacagtcctggactttcaaaaaccttgaataagtctcccacagttgtataaattggacaatttaggaattttaaactttagatgatcatttggttccatttttatttcatttttatttttgttaatgcaaacaggacttaaatgaactttgatctctgttttaaagattattaaaaaacattgtgtatctatacatatggctcttgaggacttagctttcactacactacaggatatgatctccatgtagtccatataaacctgcagagtgattttccagagtgctcgatactgttaattacatctccattagggctgaaaagaatgacctacgtttctgtatacagctgtgttgcttttgatgttgtgttactgtacacagaagtgtgtgcactgaggctctgcgtgtggtccgtatggaaaacctggtagccctgcgagttaagtactgcttccattcattgtttacgctggaatttttctccccatggaatgtaagtaaaacttaagtgtttgtcatcaataaatggtaatactaaaaaaaaaaaaa

SEQ ID NO: 2640 - DNA, 3506 bp, Homo sapiens
acttcctgccgggctgcgggcgcctgagcgctcttcagcgtttgcgcggcggctgcgcgtctctctcggctcccgcttcctttgaccgcctcccccccccggcccggcggcgcccgcctcctccacggccactccgcctcttccctcccttcgtcccttcttcctctcccttttttccttcttccttcccctcctcgccgccaccgcccaggaccgccggccgggggacgagtccggagcagcagccagagtttattaaccacttaacctctcagaactgaacaaagacaacattgttcctggaacgccctctttttaaaaaaggtagaactttagacttcatagcactgaattaacctgcactgaaagctgtttacctgcatttgttcacttttgttgaaagtgaccatgtctcaagttcaagtgcaagttcagaacccatctgctgctctctcagggagccaaatactgaacaagaaccagtctcttctctcacagcctttgatgagtattccttctactactagctctctgccctctgaaaatgcaggtagacccattcaaaactctgctttaccctctgcatctattacatccaccagtgcagctgcagaaagcataacccctactgtagaactaaatgcactgtgcatgaaacttggaaaaaaaccaatgtataagcctgttgacccttactctcggatgcagtccacctataactacaacatgagaggaggtgcttatcccccgaggtacttttacccatttccagttccacctttactttatcaagtggaactttctgtgggaggacagcaatttaatggcaaaggaaagacaagacaggctgcgaaacacgatgctgctgccaaagcgttgaggatcctgcagaatgagcccctgccagagaggctggaggtgaatggaagagaatccgaagaagaaaatctcaataaatctgaaataagtcaagtgtttgagattgcacttaaacggaacttgcctgtgaatttcgaggtggcccgggagagtggcccaccccacatgaagaactttgtgaccaaggtttcggttggggagtttgtgggggaaggtgaagggaaaagcaagaagatttcaaagaaaaatgccgccatagctgttcttgaggagctgaagaagttaccgcccctgcctgcagttgaacgagtaaagcctagaatcaaaaagaaaacaaaacccatagtcaagccacagacaagcccagaatatggccaggggatcaatccgattagccgactggcccagatccagcaggcaaaaaaggagaaggagccagagtacacgctcctcacagagcgaggcctcccgcgccgcagggagtttgtgatgcaggtgaaggttggaaaccacactgcagaaggaacgggcaccaacaagaaggtggccaagcgcaatgcagccgagaacatgctggagatccttggtttcaaagtcccgcagcggcagcccaccaaacccgcactcaagtcagaggagaagacacccataaagaaaccaggggatggaagaaaagtaaccttttttgaacctggctctggggatgaaaatgggactagtaataaagaggatgagttcaggatgccttatctaagtcatcagcagctgcctgctggaattcttcccatggtgcccgaggtcgcccaggctgtaggagttagtcaaggacatcacaccaaagattttaccagggcagctccgaatcctgccaaggccacggtaactgccatgatagcccgagagttgttgtatgggggcacctcgcccacagccgagaccattttaaagaataacatctcttcaggccacgtaccccatggacctctcacgagaccctctgagcaactggactatctttccagagtccagggattccaggttgaatacaaagacttccccaaaaacaacaagaacgaatttgtatctcttatcaattgctcctctcagccacctctgatcagccatggtatcggcaaggatgtggagtcctgccatgatatggctgcgctgaacatcttaaagttgctgtctgagttggaccaacaaagtacagagatgccaagaacaggaaacggaccaatgtctgtgtgtgggaggtgctgaaccttttctggccatgaaccattataaaatcccaacatatatactgaaaatactgaaactgctttgaaaatttggaatttctgatacctccagtgggccgagagacacggtgggtaaaggatgtgggcagcagcagggaagacaacagaaacacaaggaggcggctgtggccggctggactgtgctggggtttgttgtgatggccactcggtgacctggcggtccctacgcaatagcagctgcctgtggggaagaagggctgcccagccagctggttctcccgggacaccagcagatccacaccctgggcacctccgtgtttggtcttttttttcccctgtgtgaaagaagaaacggcacgaccccttctcaagctggctcactcagacacattgggacaaaccctggacagccatgccagagagaggcctttgaccggccccagagctaaaagcaccagagaaaatcaaatgcttcctactcagcgtgacccaacttttctagtgtgccacggccccaccacctcctgcagtacccacaccatcaccactgctttctcttccaacagtgatctgtattcttagtttcattattttcttttgattgatatgacactatataaaattttcatttgagaatttctcaattgtatctagttaaatagcacagtttggaaacttgtctgagactgactttatcaataatctaaccgacaaagatcatatccatgtgtatgtggttagacatttttatttcattgactaacccaggacagtttcagtgatgcaaattgtgtgccctctggttcagctgaaacagtcctggactttcaaaaaccttgaataagtctcccacagttgtataaattggacaatttaggaattttaaactttagatgatcatttggttccatttttatttcatttttatttttgttaatgcaaacaggacttaaatgaactttgatctctgttttaaagattattaaaaaacattgtgtatctatacatatggctcttgaggacttagctttcactacactacaggatatgatctccatgtagtccatataaacctgcagagtgattttccagagtgctcgatactgttaattacatctccattagggctgaaaagaatgacctacgtttctgtatacagctgtgttgcttttgatgttgtgttactgtacacagaagtgtgtgcactgaggctctgcgtgtggtccgtatggaaaacctggtagccctgcgagttaagtactgcttccattcattgtttacgctggaatttttctccccatggaatgtaagtaaaacttaagtgtttgtcatcaataaatggtaatactaaaaaaaaaaaaa

SEQ ID NO: 2641 - protein, 577 aa, Homo sapiens
MSQVQVQVQNPSAALSGSQILNKNQSLLSQPLMSIPSTTSSLPSENAGRPIQNSALPSASITSTSAAAESITPTVELNALCMKLGKKPMYKPVDPYSRMQSTYNYNMRGGAYPPRYFYPFPVPPLLYQVELSVGGQQFNGKGKTRQAAKHDAAAKALRILQNEPLPERLEVNGRESEEENLNKSEISQVFEIALKRNLPVNFEVARESGPPHMKNFVTKVSVGEFVGEGEGKSKKISKKNAAIAVLEELKKLPPLPAVERVKPRIKKKTKPIVKPQTSPEYGQGINPISRLAQIQQAKKEKEPEYTLLTERGLPRRREFVMQVKVGNHTAEGTGTNKKVAKRNAAENMLEILGFKVPQRQPTKPALKSEEKTPIKKPGDGRKVTFFEPGSGDENGTSNKEDEFRMPYLSHQQLPAGILPMVPEVAQAVGVSQGHHTKDFTRAAPNPAKATVTAMIARELLYGGTSPTAETILKNNISSGHVPHGPLTRPSEQLDYLSRVQGFQVEYKDFPKNNKNEFVSLINCSSQPPLISHGIGKDVESCHDMAALNILKLLSELDQQSTEMPRTGNGPMSVCGRC

SEQ ID NO: 2642 - DNA, 3142 bp, Homo sapiens
acttcctgccgggctgcgggcgcctgagcgctcttcagcgtttgcgcggcggctgcgcgtctctctcggctcccgcttcctttgaccgcctcccccccccggcccggcggcgcccgcctcctccacggccactccgcctcttccctcccttcgtcccttcttcctctcccttttttccttcttccttcccctcctcgccgccaccgcccaggaccgccggccgggggacgagtccggagcagcagccagaaagcataacccctactgtagaactaaatgcactgtgcatgaaacttggaaaaaaaccaatgtataagcctgttgacccttactctcggatgcagtccacctataactacaacatgagaggaggtgcttatcccccgaggtacttttacccatttccagttccacctttactttatcaagtggaactttctgtgggaggacagcaatttaatggcaaaggaaagacaagacaggctgcgaaacacgatgctgctgccaaagcgttgaggatcctgcagaatgagcccctgccagagaggctggaggtgaatggaagagaatccgaagaagaaaatctcaataaatctgaaataagtcaagtgtttgagattgcacttaaacggaacttgcctgtgaatttcgaggtggcccgggagagtggcccaccccacatgaagaactttgtgaccaaggtttcggttggggagtttgtgggggaaggtgaagggaaaagcaagaagatttcaaagaaaaatgccgccatagctgttcttgaggagctgaagaagttaccgcccctgcctgcagttgaacgagtaaagcctagaatcaaaaagaaaacaaaacccatagtcaagccacagacaagcccagaatatggccaggggatcaatccgattagccgactggcccagatccagcaggcaaaaaaggagaaggagccagagtacacgctcctcacagagcgaggcctcccgcgccgcagggagtttgtgatgcaggtgaaggttggaaaccacactgcagaaggaacgggcaccaacaagaaggtggccaagcgcaatgcagccgagaacatgctggagatccttggtttcaaagtcccgcagcggcagcccaccaaacccgcactcaagtcagaggagaagacacccataaagaaaccaggggatggaagaaaagtaaccttttttgaacctggctctggggatgaaaatgggactagtaataaagaggatgagttcaggatgccttatctaagtcatcagcagctgcctgctggaattcttcccatggtgcccgaggtcgcccaggctgtaggagttagtcaaggacatcacaccaaagattttaccagggcagctccgaatcctgccaaggccacggtaactgccatgatagcccgagagttgttgtatgggggcacctcgcccacagccgagaccattttaaagaataacatctcttcaggccacgtaccccatggacctctcacgagaccctctgagcaactggactatctttccagagtccagggattccaggttgaatacaaagacttccccaaaaacaacaagaacgaatttgtatctcttatcaattgctcctctcagccacctctgatcagccatggtatcggcaaggatgtggagtcctgccatgatatggctgcgctgaacatcttaaagttgctgtctgagttggaccaacaaagtacagagatgccaagaacaggaaacggaccaatgtctgtgtgtgggaggtgctgaaccttttctggccatgaaccattataaaatcccaacatatatactgaaaatactgaaactgctttgaaaatttggaatttctgatacctccagtgggccgagagacacggtgggtaaaggatgtgggcagcagcagggaagacaacagaaacacaaggaggcggctgtggccggctggactgtgctggggtttgttgtgatggccactcggtgacctggcggtccctacgcaatagcagctgcctgtggggaagaagggctgcccagccagctggttctcccgggacaccagcagatccacaccctgggcacctccgtgtttggtcttttttttcccctgtgtgaaagaagaaacggcacgaccccttctcaagctggctcactcagacacattgggacaaaccctggacagccatgccagagagaggcctttgaccggccccagagctaaaagcaccagagaaaatcaaatgcttcctactcagcgtgacccaacttttctagtgtgccacggccccaccacctcctgcagtacccacaccatcaccactgctttctcttccaacagtgatctgtattcttagtttcattattttcttttgattgatatgacactatataaaattttcatttgagaatttctcaattgtatctagttaaatagcacagtttggaaacttgtctgagactgactttatcaataatctaaccgacaaagatcatatccatgtgtatgtggttagacatttttatttcattgactaacccaggacagtttcagtgatgcaaattgtgtgccctctggttcagctgaaacagtcctggactttcaaaaaccttgaataagtctcccacagttgtataaattggacaatttaggaattttaaactttagatgatcatttggttccatttttatttcatttttatttttgttaatgcaaacaggacttaaatgaactttgatctctgttttaaagattattaaaaaacattgtgtatctatacatatggctcttgaggacttagctttcactacactacaggatatgatctccatgtagtccatataaacctgcagagtgattttccagagtgctcgatactgttaattacatctccattagggctgaaaagaatgacctacgtttctgtatacagctgtgttgcttttgatgttgtgttactgtacacagaagtgtgtgcactgaggctctgcgtgtggtccgtatggaaaacctggtagccctgcgagttaagtactgcttccattcattgtttacgctggaatttttctccccatggaatgtaagtaaaacttaagtgtttgtcatcaataaatggtaatactaaaaaaaaaaaaa

SEQ ID NO: 2643 - DNA, 1873 bp, Homo sapiens
ccacgtgagcgcctgcgtttctcctcaaacctaacgatgccgccggagcggaggagacgaatgaaactggaccggagaaccggagcgaagcgaagcggaagcccggaatgaggccggactggaaagccggagcggggccaggcgggcctccccaaaagcctgccccttcatcccagcggaaaccgccggcccggccgagcgcggcggccgctgcgattgcagtcgcggcggcggaggaagagagacggctccggcagcggaaccgcctgaggctggaggaggacaaaccggccgtggagcggtgcttggaggagctggtcttcggcgacgtcgagaacgacgaggacgcgttgctgcggcgtctgcgaggcccgagggttcaagaacatgaagactcgggtgactcagaagtggagaatgaagcaaaaggtaattttccacctcaaaagaagccagtttgggtggatgaagaagatgaagatgaggaaatggttgacatgatgaacaatcggtttcggaaggatatgatgaaaaatgctagtgaaagtaaactttcgaaagacaaccttaaaaagagacttaaagaagaattccaacatgccatgggaggagtacctgcctgggcagagactactaagcggaaaacatcttcagatgatgaaagtgaagaggatgaagatgatttgttgcaaaggactgggaatttcatatccacatcaacttctcttccaagaggaatcttgaagatgaagaactgccagcatgcgaatgctgaacgtcctactgttgctcggatctcatctgtgcagttccatcccggtgcacagattgtgatggttgctggattagataatgctgtatcactatttcaggttgatgggaaaacaaatcctaaaattcagagcatctatttggaaaggtttccaatctttaaggcttgttttagtgctaatggggaagaagttttagccacgagtacccacagcaaggttctttatgtctatgacatgctggctggaaagttaattcctgtgcatcaagtgagaggtttgaaagagaagatagtgaggagctttgaagtctccccagatgggtccttcttgctcataaatggcattgctggatatttgcatttgctagcaatgaagaccaaagaactgattggaagcatgaaaattaatggaagggttgcagcatccacattctcttcagatagtaagaaagtatacgcctcttcgggggatggagaagtttatgtttgggatgtgaactcaaggaagtgccttaacagatttgttgatgaaggcagtttatatggattaagcattgccacatctaggaatggacagtatgttgcttgtggttctaattgtggagtggtaaatatatacaatcaagattcttgtctccaagaaacaaacccaaagccaataaaagctataatgaacttggttacaggtgttacttctctgaccttcaatcctactacagaaatcttggcaattgcttcagaaaaaatgaaagaagcagtcagattggttcatcttccttcctgtacagtattttcaaacttcccagtcattaaaaataagaatatttctcatgttcataccatggatttttctccgagaagtggatactttgccttggggaatgaaaaggcaaggccctgatgtataggttgcaccattactcagacttctaaagagactatttgaagtccagttgagtcacaagagaagcctgtcttgatatatcatctcagaaactttcctgaatatgtgataatatatggaaaatgatttatagatccagctgtgcttaagagccagtaatgtcttaataaacatgtggcagcttttgtttgaaaaaa

SEQ ID NO: 2644 - protein, 521 aa, Homo sapiens
MRPDWKAGAGPGGPPQKPAPSSQRKPPARPSAAAAAIAVAAAEEERRLRQRNRLRLEEDKPAVERCLEELVFGDVENDEDALLRRLRGPRVQEHEDSGDSEVENEAKGNFPPQKKPVWVDEEDEDEEMVDMMNNRFRKDMMKNASESKLSKDNLKKRLKEEFQHAMGGVPAWAETTKRKTSSDDESEEDEDDLLQRTGNFISTSTSLPRGILKMKNCQHANAERPTVARISSVQFHPGAQIVMVAGLDNAVSLFQVDGKTNPKIQSIYLERFPIFKACFSANGEEVLATSTHSKVLYVYDMLAGKLIPVHQVRGLKEKIVRSFEVSPDGSFLLINGIAGYLHLLAMKTKELIGSMKINGRVAASTFSSDSKKVYASSGDGEVYVWDVNSRKCLNRFVDEGSLYGLSIATSRNGQYVACGSNCGVVNIYNQDSCLQETNPKPIKAIMNLVTGVTSLTFNPTTEILAIASEKMKEAVRLVHLPSCTVFSNFPVIKNKNISHVHTMDFSPRSGYFALGNEKARP

SEQ ID NO: 2645 - DNA, 1222 bp, Homo sapiens
aaagtttccattttttaaagttaccctcgttttcaaaggtattttctaaacagatctttaatggactatttaaaccgaatttaaggaattcacacacgacagttgacaggtcttcacgcaggctggttggtaacgtgctgccagcacagggctgggtgatacgtacaccctaagccgggggtgcctggggctggggggcgctccttgcaatgcccctccagccacagggcagtgaggtgctgcctgtgtgagccgtcgggggagcggccggctgtgggggcagcgcagcaggagcatcgtggggcctttccttctcggctggttctctgtgacggtggcgtcggctcgcctctgctcctttcatctagaaagaagccactgaccctgacagcccacggcgggtacactgagcagctgcattggtgctgtcacttttttaaggctttctgtccagacttcaacactggtttcttttcagagtttcgaaggattaatgacttcctcagcgcccttgctggcgggctgagggtgacagtcacgtccgtttcttctgtattagaaggctgcggtgattcaattagattgtcccactgctgagacctgtagggcagcttctaacatgcttttttcaaggggagaggagtagtgacaagtcgtgtgtcggaattggatttgagaacactctgaatgacccctggaggccgagggggcaggcttcgggcgtgaactgaactccagacccctctttgtgttgggcagtgtcatcttgcttacaaactgtaagacacatttttttgtgtgtttgtttttgttgttgttcttttgcagcactcacgcctctgacagtcttttgggaaagagtaacacccacatacagaatttgtcacatccagagtagcactgttccttaatactggcataatgcttccaggaagtttttcttttttatatttaaaatgttacttttctgtatgatgtgcatgcaagtttaccgtaacttttcttaaactttttagtgccgtttctagtatattcctgtaaatgtcagttactgaaaatgagtccaatgtaagtagtttagcttgtttattgcaatgctggcctcaacacaacagaataaaaatggtagaaagtactctttgatgtttctggtaatcatggacccttctcctggggcatttgttttgttttcataataaaaagcaaaaaaaaaaaaaaaaaa

SEQ ID NO: 2646 - DNA, 1890 bp, Homo sapiens
ctagagaggccgccaggagacccggcgctttcttccttctgcagctgaggctgcggcggggccggggctggggtcggggccaggaggaattttgttgtcagagaataaaaggaggttgtccataattgactttaagcagcaatcagtaaaacattgagctcttcagctccgcctttcttgctctgaaaattggaaaaccaagaaggttttgatgttttgtgtgacgccacctgaattagaaaccaagatgaacataaccaaaggtggtctggtgttgttttcagcaaactcgaattcatcatgtatggagctatcaaagaaaattgcagagcggctaggggtggagatgggcaaagtgcaggtttaccaggaacctaacagagaaacaagagtacaaattcaagagtctgtgaggggaaaagatgttttcatcatccaaactgtttcgaaggacgtgaacaccaccatcatggagctcctgatcatggtgtatgcatgtaagacctcttgtgccaagagcatcattggcgtgataccctactttccttacagcaagcagtgcaagatgagaaaaagaggctccattgtctctaaattgctggcttccatgatgtgcaaagctggtctaactcatcttattactatggatttacaccagaaggaaattcagggcttcttcaatattcctgttgacaatttaagagcatctcccttcttattacagtatattcaagaagagatcccagattacaggaatgcagtaatcgtggccaagtctccagcctcggcgaagagggcacagtcttttgctgagcgcctgcgcctgggaattgcagtgattcatggagaggcgcaggatgccgagtcggacttggtggatggacggcattccccacccatggtcagaagtgtggctgccatccaccccagcctggagatccccatgctgattcctaaagaaaagcccccaatcacggttgtgggtgatgttggaggaaggattgccatcatcgtggatgacatcattgatgatgttgacagctttcttgctgcagcagagaccctgaaggaaagaggtgcatataagatctttgtgatggcaactcatggcttgttgtcttctgacgccccccggcggattgaagagtctgccattgatgaggtggtggtcaccaatacaattccacatgaagtccagaagctccagtgccccaagattaaaactgtggatatcagcatgatcctttcagaggcgatccgtcggatccacaatggggagtccatgtcctaccttttcagaaacataggcttagatgactgagttttcctttaggaaaactcccgagggccaaactggaaacataagagtgactgctcggtgggatggatttcacaggaaccgtcatgcttgttcctccctctcccctgtaacctcacttcttattgattcctaagaagatagaccaactttttatgtcggtttgggtgtttgtgagtttggggagcaatttttataaaagaaaaactttattctcctcttttgaaaaggtaagacctcgttttagttgtaactgtttaaaaaataacacttggaataagatttgtaagctcacaaagccttcttccaaagttgcttgagccaagtgcttaaaaagttaataaaataaaatgatctgtatgatacctgcaattgaaaagccgaaaagattatactgtcaagtccagtaaatgacatttttagagatgcttttgtagacaagcatatggaatatgtgattgtatttattttctgcaactaaaaaaggaataaaaacttgtgtttgtgtgtttttctaaaactttgtgttttggcaatcgttttataactaaaataaaatgaaagctaaatct

SEQ ID NO: 2647 - protein, 369 aa, Homo sapiens
MFCVTPPELETKMNITKGGLVLFSANSNSSCMELSKKIAERLGVEMGKVQVYQEPNRETRVQIQESVRGKDVFIIQTVSKDVNTTIMELLIMVYACKTSCAKSIIGVIPYFPYSKQCKMRKRGSIVSKLLASMMCKAGLTHLITMDLHQKEIQGFFNIPVDNLRASPFLLQYIQEEIPDYRNAVIVAKSPASAKRAQSFAERLRLGIAVIHGEAQDAESDLVDGRHSPPMVRSVAAIHPSLEIPMLIPKEKPPITVVGDVGGRIAIIVDDIIDDVDSFLAAAETLKERGAYKIFVMATHGLLSSDAPRRIEESAIDEVVVTNTIPHEVQKLQCPKIKTVDISMILSEAIRRIHNGESMSYLFRNIGLDD

SEQ ID NO: 2648 - DNA, 2762 bp, Homo sapiens
gggggggttggtgtcatggcagctgcggggagccgcaagaggcgcctggcggagctgacggtggacgagttcctagcttcgggctttgactccgagtccgaatccgagtccgaaaattctccacaagcggagacacgggaagcacgcgaggctgcccggagtccggataagccgggcgggagcccctcggccagccggcgtaaaggccgtgcctctgagcacaaagaccagctctctcggctgaaggacagagaccccgagttctacaagttcctgcaggagaatgaccagagcctgctaaacttcagcgactcggacagctctgaggaggaagaggggccgttccactccctgccagatgtgctggaggaagccagtgaggaggaggatggagcggaggaaggagaagatggggacagagtccccagagggctgaaggggaagaagaattctgttcctgtgaccgtcgccatggttgagagatggaagcaggcagcaaagcaacgcctcactccaaagctgttccatgaagtggtacaggcgttccaagcagctgtggccaccacccgaggggaccaggaaagtgctgaggccaacaaattccaggtcacggacagtgctgcattcaatgctctggttaccttctgcatcagagacctcattggctgtctccagaagctgctgtttggaaaggtggcaaaggatagcagcaggatgctgcagccgtccagcagcccgctctgggggaagcttcgtgtggacatcaaggcttacctgggctcggccatacagctggtgtcctgtctgtcggagacgacggtgttggcggccgtgctgcggcacatcagcgtgctggtgccctgcttcctgaccttccccaagcagtgccgcatgctgctcaagagaatggtggtcgtatggagcactggggaggagtctctgcgggtgctggctttcctggtcctcagcagagtctgccggcacaagaaggacactttccttggccccgtcctcaagcaaatgtacatcacgtatgtgaggaactgcgagttcacctcgcctggtgccctccccttcatcagtttcatgcagtggaccttgacggagctgctggccctggagccgggtgtggcctaccagcacgccttcctctacatccgccagctcgccatacacctgcgcaacgccatgaccacccgcaagaaggaaacataccagtctgtgtacaactggcagtatgtgcactgcctcttcctgtggtgccgggtcctgagcactgcgggccccagcgaagccctccagcccttggtctacccccttgcccaagtcatcattggctgtatcaagctcatccccactgcccgcttctacccgctgcgaatgcactgcatccgtgccctgacgctgctctcggggagctcgggggccttcatcccggtgctgcctttcatcctggagatgttccagcaggtcgacttcaacaggaagccagggcgcatgagctccaagcccatcaacttctccgtgatcctgaagctgtccaatgtcaacctgcaggagaaggcgtaccgggacggcctggtggagcagctgtacgacctcaccctggagtacctgcacagccaggcacactgcatcggcttcccggagctggtgctgcctgtggtcctgcagctgaagtcgttcctccgggagtgcaaggtggccaactactgccggcaggtgcagcagctgcttgggaaggttcaggagaactcggcatacatctgcagccgccgccagagggtttccttcggcgtctctgagcagcaggcagtggaagcctgggagaagctgacccgggaagaggggacacccttgaccttgtactacagccactggcgcaagctgcgtgaccgggagatccagctggagatcagtggcaaagagcggctggaagacctgaacttccctgagatcaaacgaaggaagatggctgacaggaaggatgaggacaggaagcaatttaaagacctctttgacctgaacagctctgaagaggacgacactgagggattctcggagagagggatactgaggcccctgagcactcggcatggggtggaagacgatgaagaggacgaggaggagggcgaggaggacagcagcaactcggaggatggagacccagacgcagaggcggggctggcccctggggagctgcagcagctggcccaggggccggaggacgagctggaggatctgcagctctcagaggacgactgaggcagcccatctggggggcctgtaggggctgccgggctggtggccagtgtttccacctccctggcagtcaggcctagaggctggcgtctgtgcagttgggggaggcagtagacacgggacaggctttattatttatttttcagcatgaaagaccaaacgtatcgagagctgggctgggctgggctggtgtggctgctgaagccccacagctgtgggctgctgaagtcagctccgcgggggagctgaccctgacgtcagcagaccgagaccagtcccagttccagggggaggcctgcaggcccctggccccttccaccacctctgccctccgtctgcagacctcgtccatctgcaccaggctctgccttcactcccccaagtctttggaaatttgttcttttcctttgaagtcacattttcttttaaaattttttgttttgcatccgaaaccgaaagaaataaagcggtgggaggcaggaaaaaaaaaaaaaaaaaaa

SEQ ID NO: 2649 - protein, 749 aa, Homo sapiens
MAAAGSRKRRLAELTVDEFLASGFDSESESESENSPQAETREAREAARSPDKPGGSPSASRRKGRASEHKDQLSRLKDRDPEFYKFLQENDQSLLNFSDSDSSEEEEGPFHSLPDVLEEASEEEDGAEEGEDGDRVPRGLKGKKNSVPVTVAMVERWKQAAKQRLTPKLFHEVVQAFQAAVATTRGDQESAEANKFQVTDSAAFNALVTFCIRDLIGCLQKLLFGKVAKDSSRMLQPSSSPLWGKLRVDIKAYLGSAIQLVSCLSETTVLAAVLRHISVLVPCFLTFPKQCRMLLKRMVVVWSTGEESLRVLAFLVLSRVCRHKKDTFLGPVLKQMYITYVRNCEFTSPGALPFISFMQWTLTELLALEPGVAYQHAFLYIRQLAIHLRNAMTTRKKETYQSVYNWQYVHCLFLWCRVLSTAGPSEALQPLVYPLAQVIIGCIKLIPTARFYPLRMHCIRALTLLSGSSGAFIPVLPFILEMFQQVDFNRKPGRMSSKPINFSVILKLSNVNLQEKAYRDGLVEQLYDLTLEYLHSQAHCIGFPELVLPVVLQLKSFLRECKVANYCRQVQQLLGKVQENSAYICSRRQRVSFGVSEQQAVEAWEKLTREEGTPLTLYYSHWRKLRDREIQLEISGKERLEDLNFPEIKRRKMADRKDEDRKQFKDLFDLNSSEEDDTEGFSERGILRPLSTRHGVEDDEEDEEEGEEDSSNSEDGDPDAEAGLAPGELQQLAQGPEDELEDLQLSEDD

SEQ ID NO: 2650 - DNA, 5023 bp, Homo sapiens
ggcggcggcgagccggtgccctgggatcatggtggcgttgcggggccttggtagcggcctgcagccctggtgtccgctggatcttagactcgaatgggttgacacagtgtgggaactggatttcacagagactgagcctttggatcccagcatagaagcagagatcatagagactggattggctgcattcacaaaactctatgaaagccttttaccctttgctactggagaacatggatctatggagagtatctggaccttcttcattgagaacaatgtttcccatagtacactggtggcattgttctatcattttgttcaaatagttcataagaagaatgtcagtgtacagtatcgagaatatggccttcatgccgctgggctttactttttgctactagaagtaccaggcagtgtagccaatcaagtattccacccagtgatgtttgacaaatgcattcagactctaaagaagagctggccccaggaatctaacttgaatcggaaaagaaagaaagaacagcctaagagctctcaggctaaccccgggaggcatagaaaaaggggaaagccacccaggagagaagatattgagatggatgaaattatagaagaacaagaagatgagaatatttgtttttctgcccgggacctttctcaaattcgaaatgccatctttcaccttttaaagaattttttaaggcttctgccaaagttttccttgaaagaaaagccacaatgtgtacagaattgtatagaggtctttgtttcattaactaattttgagccagttcttcatgaatgtcatgttacacaagccagagctcttaaccaagcaaaatacataccagaactggcttattatggattgtatttgctgtgctctcccattcatggagaaggagataaggtcatcagttgtgttttccatcaaatgctcagtgtaatattaatgttagaagttggtgaaggatcccatcgtgccccccttgctgttacctcccaagtcatcaactgtagaaaccaggcggtccagtttatcagcgcccttgtggatgaattaaaggagagtatattcccagtcgtccgtatcttactgcagcacatctgtgccaaggtggtagataaatcagagtatcgtacttttgcagcccagtccctagtccagctgctcagtaaacttccttgtggggaatacgctatgttcattgcctggctttacaaatactcccgaagttccaagatcccacaccgggtttttactcttgatgttgtcttagctctgttagaactgcctgaaagagaggtggataacaccctctccttggagcatcagaagttcttaaagcataagttcctggtgcaggaaattatgtttgatcgttgcttagacaaggcgcctactgtccgcagcaaggcactgtccagctttgcacactgtctggagttgactgttaccagtgcgtcggagagtatcctggagctcctgattaacagtcctacgttttctgtaatagagagtcaccctggtaccttactgagaaattcatcagctttttcctaccaaaggcagacatctaaccgttccgaaccctcaggggagatcaacatagacagcagtggtgaaacagttggatctggagaaagatgtgtcatggcaatgctgagaaggaggatcagggatgagaagaccaacgttaggaagtctgcactgcaggtattagtgagtattttgaaacactgtgatgtctcaggcatgaaggaagacctgtggattctgcaggaccagtgtcgggaccctgcagtgtctgtccggaagcaggccctccagtctcttactgaactccttatggctcagcctagatgcgtgcagatccagaaagcctggttgcggggggtggtcccggtggtgatggactgcgagagcactgtgcaggagaaggccctggagttcctggaccagctgctgctgcagaacatccggcatcacagtcattttcactctggggacgacagccaggtcctcgcctgggcgcttcttactctcctcaccaccgaaagccaggaactgagccgatatttaaataaggcttttcatatctggtccaagaaagaaaaattctcacccacttttataaacaatgtaatatctcacactggcacggaacattcggcacctgcctggatgctgctctccaagattgctggctcctcacccaggctggactacagcagaataatacaatcttgggagaaaatcagcagtcagcagaatcccaattcaaacaccttaggacatattctctgtgtgattgggcatattgcaaagcatcttcctaagagcacccgggacaaagtgactgatgctgtcaagtgtaagctgaatggatttcagtggtctctagaggtgatcagttcagctgttgacgccttgcagaggctttgtagagcatctgcagagacaccagcagaggagcaggaattgctgacgcaggtgtgtggggatgtactctccacctgcgagcaccgcctctccaacatcgttctcaaggagaatggaacagggaatatggacgaagacctgttggtgaagtacatttttaccttaggggatatagcccagctgtgtccagccagggtggagaagcgcatcttccttctgattcagtccgtcctggcttcgtctgctgatgctgaccactcaccatcatctcaaggcagcagtgaggccccagcgtctcagccacccccccaggtcagaggttctgtcatgccctctgtgattagagcacatgccatcattaccttaggtaagctgtgcttacagcacgaggatctggcaaagaagagcatcccagccctggtgcgagagctcgaggtgtgtgaggacgtggctgtccgcaacaacgtcatcattgtaatgtgcgatctctgcattcgctacaccatcatggtggacaagtatattcccaacatctccatgtgtctgaaggattccgacccattcatccggaagcagacactcatcttgcttaccaatctcttgcaggaggaatttgtgaaatggaagggctccctgttcttccgatttgtcagcactctgatcgattcacacccagacattgccagcttcggggagttttgcctggctcacctgttactgaagaggaaccctgtcatgttcttccaacacttcattgaatgtatttttcactttaataactatgagaagcatgagaagtacaacaagttcccccagtcagagagagagaagcggctgttttcattgaagggaaagtcaaacaaagagagacgaatgaaaatctacaaatttcttctagagcacttcacagatgaacagcgattcaacatcacttccaaaatctgccttagtattttggcgtgctttgctgatggcatcctacccctggacctggacgccagtgagttactctcagacacgtttgaggtcctcagctcaaaggagatcaagcttttggcaatgagatctaaaccagacaaagacctccttatggaagaagatgacatggccttggcaaatgtagtcatgcaggaagctcagaagaagctcatctcacaagttcagaagaggaatttcatagaaaatattattccaattatcatctccctgaagactgtgctggagaaaaataagatcccagctttgcgggaactcatgcactatctcagggaggtgatgcaggattaccgagatgagctcaaggacttctttgcagttgacaaacagctggcatcagagcttgagtatgacatgaagaagtaccaggaacagctggtccaggagcaggagctagcaaaacatgcagatgtggccgggacggctggaggtgctgaggtggcacctgtggcacaggttgccctgtgtttagaaacagtgccagttcctgctggccaagaaaaccctgccatgtcacctgccgtgagccagccctgcacacccagggcaagtgctggccatgtagcagtatcatctcctacacctgaaacagggccattgcagaggttgctgcccaaagccaggcccatgtccctgagcaccattgcaatcctgaattctgtcaagaaagccgtggagtcaaagagcaggcatcggagtcggagcttaggagtgctgcctttcactttaaattctggaagcccagaaaaaacgtgcagtcaggtgtcttcatacagtttggagcaagagtcgaatggcgagattgagcacgtgaccaagcgggccatcagcacccccgagaagagcatcagtgatgtcacgtttggagcaggggtcagttacatcgggacaccacggactccgtcgtcagccaaagagaaaattgaaggccggagtcaaggaaatgacatcttatgtttatcactgcctgataaaccgcccccacagcctcagcagtggaatgtgcggtctcccgccaggaataaagacactccagcctgcagcaggaggtccctccgaaagacccctctgaaaacagccaactaaacagcgcctcccaccagtgtccaggcaggcaggagcccttgaggaagcagtctcgtgtcctccgtgtgaaggcagctggatcacttcccgcagtccttgggcagcgctttgctgtggaacacgagagctcctcctcaggggcctggcactcaccttctattctgtatgatgtatttggttaaacactgtcaaataatagagatgtgccagatttagattttcttaccctaatctgtttaatattgtaactttattccatttgaaagtgtcaagcccattcagataagctataatctggtctttaaggaatacaactttaaaactgcagctttcttttatataaatcaagcctctgttaacttgaattccttatagtacatattttcccatctgtaatgccggaattttgattctaatattttttctattatttataagtgcaaatttttttaaaaagtgtacagctttcttaaagtaataaaggtttagcataaatac

SEQ ID NO: 2651 - protein, 1507 aa, Homo sapiens
AAASRCPGIMVALRGLGSGLQPWCPLDLRLEWVDTVWELDFTETEPLDPSIEAEIIETGLAAFTKLYESLLPFATGEHGSMESIWTFFIENNVSHSTLVALFYHFVQIVHKKNVSVQYREYGLHAAGLYFLLLEVPGSVANQVFHPVMFDKCIQTLKKSWPQESNLNRKRKKEQPKSSQANPGRHRKRGKPPRREDIEMDEIIEEQEDENICFSARDLSQIRNAIFHLLKNFLRLLPKFSLKEKPQCVQNCIEVFVSLTNFEPVLHECHVTQARALNQAKYIPELAYYGLYLLCSPIHGEGDKVISCVFHQMLSVILMLEVGEGSHRAPLAVTSQVINCRNQAVQFISALVDELKESIFPVVRILLQHICAKVVDKSEYRTFAAQSLVQLLSKLPCGEYAMFIAWLYKYSRSSKIPHRVFTLDVVLALLELPEREVDNTLSLEHQKFLKHKFLVQEIMFDRCLDKAPTVRSKALSSFAHCLELTVTSASESILELLINSPTFSVIESHPGTLLRNSSAFSYQRQTSNRSEPSGEINIDSSGETVGSGERCVMAMLRRRIRDEKTNVRKSALQVLVSILKHCDVSGMKEDLWILQDQCRDPAVSVRKQALQSLTELLMAQPRCVQIQKAWLRGVVPVVMDCESTVQEKALEFLDQLLLQNIRHHSHFHSGDDSQVLAWALLTLLTTESQELSRYLNKAFHIWSKKEKFSPTFINNVISHTGTEHSAPAWMLLSKIAGSSPRLDYSRIIQSWEKISSQQNPNSNTLGHILCVIGHIAKHLPKSTRDKVTDAVKCKLNGFQWSLEVISSAVDALQRLCRASAETPAEEQELLTQVCGDVLSTCEHRLSNIVLKENGTGNMDEDLLVKYIFTLGDIAQLCPARVEKRIFLLIQSVLASSADADHSPSSQGSSEAPASQPPPQVRGSVMPSVIRAHAIITLGKLCLQHEDLAKKSIPALVRELEVCEDVAVRNNVIIVMCDLCIRYTIMVDKYIPNISMCLKDSDPFIRKQTLILLTNLLQEEFVKWKGSLFFRFVSTLIDSHPDIASFGEFCLAHLLLKRNPVMFFQHFIECIFHFNNYEKHEKYNKFPQSEREKRLFSLKGKSNKERRMKIYKFLLEHFTDEQRFNITSKICLSILACFADGILPLDLDASELLSDTFEVLSSKEIKLLAMRSKPDKDLLMEEDDMALANVVMQEAQKKLISQVQKRNFIENIIPIIISLKTVLEKNKIPALRELMHYLREVMQDYRDELKDFFAVDKQLASELEYDMKKYQEQLVQEQELAKHADVAGTAGGAEVAPVAQVALCLETVPVPAGQENPAMSPAVSQPCTPRASAGHVAVSSPTPETGPLQRLLPKARPMSLSTIAILNSVKKAVESKSRHRSRSLGVLPFTLNSGSPEKTCSQVSSYSLEQESNGEIEHVTKRAISTPEKSISDVTFGAGVSYIGTPRTPSSAKEKIEGRSQGNDILCLSLPDKPPPQPQQWNVRSPARNKDTPACSRRSLRKTPLKTAN

SEQ ID NO: 2652 - DNA, 894 bp, Homo sapiens
atgaagcacattatcaactcgtatgaaaacatcaacaacacagcaagaaataattccgactgtcctcgtgtggttttgccggaggagatatttttcacaatttccattgttggagttttggagaatctgatcgtcctgctggctgtgttcaagaataagaatctccaggcacccatgtactttttcatctgtagcttggccatatctgatatgctgggcagcctatataagatcttggaaaatatcctgatcatattgagaaacatgggctatctcaagccacgtggcagttttgaaaccacagccgatgacatcatcgactccctgtttgtcctctccctgcttggctccatcttcagcctgtctgtgattgctgcggaccgctacatcaccatcttccacgcactgcggtaccacagcatcgtgaccatgcgccgcactgtggtggtgcttacggtcatctggacgttctgcacggggactggcatcaccatggtgatcttctcccatcatgtgcccacagtgatcaccttcacgtcgctgttcccgctgatgctggtcttcatcctgtgcctctatgtgcacatgttcctgctggctcgatcccacaccaggaagatctccaccctccccagagccaacatgaaaggggccatcacactgaccatcctgctcggggtcttcatcttctgctgggccccctttgtgcttcatgtcctcttgatgacattctgcccaagtaacccctactgcgcctgctacatgtctctcttccaggtgaacggcatgttgatcatgtgcaatgccgtcattgaccccttcatatatgccttccggagcccagagctcagggacgcattcaaaaagatgatcttctgcagcaggtactggtag

SEQ ID NO: 2653 - protein, 297 aa, Homo sapiens
MKHIINSYENINNTARNNSDCPRVVLPEEIFFTISIVGVLENLIVLLAVFKNKNLQAPMYFFICSLAISDMLGSLYKILENILIILRNMGYLKPRGSFETTADDIIDSLFVLSLLGSIFSLSVIAADRYITIFHALRYHSIVTMRRTVVVLTVIWTFCTGTGITMVIFSHHVPTVITFTSLFPLMLVFILCLYVHMFLLARSHTRKISTLPRANMKGAITLTILLGVFIFCWAPFVLHVLLMTFCPSNPYCACYMSLFQVNGMLIMCNAVIDPFIYAFRSPELRDAFKKMIFCSRYW

SEQ ID NO: 2654 - DNA, 2068 bp, Homo sapiens
ggtggttcttgcccgtgttgtgtgtgtgtgtgagtgagagagcgagtgagtgagtgagtgagtgtgtgtgtgggggggactcggcttgttgttgtcggtgacttccccctccccttcaccccttcccctccccgccgccgctgcagtggccgctccctgggccgtaggaaatgagcgataacgatgacatcgaggtggagagcgacgaagagcaaccgaggtttcaatctgcggctgacaaacgggctcatcataatgcactggaacgaaaacgtagggaccacatcaaagacagctttcacagtttgcgggactcagtcccatcactccaaggagagaaggcatcccgggcccaaatcctagacaaagccacagaatatatccagtatatgcgaaggaaaaaccacacacaccagcaagatattgacgacctcaagcggcagaatgctcttctggagcagcaagtccgtgcactggagaaggcgaggtcaagtgcccaactgcagaccaactacccctcctcagacaacagcctctacaccaacgccaagggcagcaccatctctgccttcgatgggggctcggactccagctcggagtctgagcctgaagagccccaaagcaggaagaagctccggatggaggccagctaagccactcggggcaggccagcaataaaaactgtctgtctccatcgtctcatcctcctttcagttcgttggtagagccctcagaaccatttaagagactctttatttttctctttctcccttttttttttaaatttttatttttacgtagaagctcttggacaacagctctcgttctccttccccatttccactgtatattttttaatgtattcccttcagggattccctgtccccaacaggaatttttaaaccaaaacaccccaacttggcagctttttctgtggaggacagacggccggccggacctctgagcacatagtgtcctgcccaccctaccagctcctccagccctgccgggcacatgcccgggggacgcctgccctgcccaggtggcctcctggcccgccctcacctctgatagactttgtgaatctgaactgctctactttgagaagatgaccggtttggagtaatcagaatgaaccctcctcctttttaagggttttttttttttcctttttctaaaaagctatgtatcgctcctattgaaagaccagatccttagagaagtttgtggtataaaaaggaagtggggacagattcgcagcacagagtcgctggcatgtttcactcctgcttctctcagccagctgtttaagcctgcggcgccagcctcacggagggccgtgtgacactctcgtggtatgtatgggagatggcagcagtgaagcagcagccaccagggagtggccatttggggttgggacagggagggtgttttgggtggcatagaggttttgtattgagggccagtgatgatgttttgatatttatttcctgctacttaaatttgaatctgagtgaattgtacctatttctgatgatgtcggtcttgcaaagcgacagattcataaagtaatgatgaaatctttctttcttcccgtgtgtatttctaagaaatagagccaactgattttgtatgtaaataccaagagcaatttacctggtactaaacccgcaccccagtgcggacccttcccagccctcatcccacttcctttcctactgtcctggaacctgtctccattgtgtgatccagccctggttctggctgtggtcagcagatgccagtgaagggttttgtgtgtttaggcctcatttctttgtctttttcctactccgttcctggcatttgctgatttctagtgtatactctgtagtctcagttcgtgtttgattccattccatggaaataaaaagtatgttgtacatactgccgaagaattgtcttgcaagttaaggcttccccctttactataagactataaataaaaacttattttatccttaaaaaaaaaaaaaaaaaaaaaaaaaaaaaaaaaaaaaaaaaaaaaaaaaaaaaaaaaaaaaaaaaa

SEQ ID NO: 2655 - protein, 103 aa, Homo sapiens
MSDNDDIEVESDEEQPRFQSAADKRAHHNALERKRRDHIKDSFHSLRDSVPSLQGEKASRAQILDKATEYIQYMRRKNHTHQQDIDDLKRQNALLEQQGESES

SEQ ID NO: 2656 - DNA, 2041 bp, Homo sapiens
ggtggttcttgcccgtgttgtgtgtgtgtgtgagtgagagagcgagtgagtgagtgagtgagtgtgtgtgtgggggggactcggcttgttgttgtcggtgacttccccctccccttcaccccttcccctccccgccgccgctgcagtggccgctccctgggccgtaggaaatgagcgataacgatgacatcgaggtggagagcgacgctgacaaacgggctcatcataatgcactggaacgaaaacgtagggaccacatcaaagacagctttcacagtttgcgggactcagtcccatcactccaaggagagaaggcatcccgggcccaaatcctagacaaagccacagaatatatccagtatatgcgaaggaaaaaccacacacaccagcaagatattgacgacctcaagcggcagaatgctcttctggagcagcaagtccgtgcactggagaaggcgaggtcaagtgcccaactgcagaccaactacccctcctcagacaacagcctctacaccaacgccaagggcagcaccatctctgccttcgatgggggctcggactccagctcggagtctgagcctgaagagccccaaagcaggaagaagctccggatggaggccagctaagccactcggggcaggccagcaataaaaactgtctgtctccatcgtctcatcctcctttcagttcgttggtagagccctcagaaccatttaagagactctttatttttctctttctcccttttttttttaaatttttatttttacgtagaagctcttggacaacagctctcgttctccttccccatttccactgtatattttttaatgtattcccttcagggattccctgtccccaacaggaatttttaaaccaaaacaccccaacttggcagctttttctgtggaggacagacggccggccggacctctgagcacatagtgtcctgcccaccctaccagctcctccagccctgccgggcacatgcccgggggacgcctgccctgcccaggtggcctcctggcccgccctcacctctgatagactttgtgaatctgaactgctctactttgagaagatgaccggtttggagtaatcagaatgaaccctcctcctttttaagggttttttttttttcctttttctaaaaagctatgtatcgctcctattgaaagaccagatccttagagaagtttgtggtataaaaaggaagtggggacagattcgcagcacagagtcgctggcatgtttcactcctgcttctctcagccagctgtttaagcctgcggcgccagcctcacggagggccgtgtgacactctcgtggtatgtatgggagatggcagcagtgaagcagcagccaccagggagtggccatttggggttgggacagggagggtgttttgggtggcatagaggttttgtattgagggccagtgatgatgttttgatatttatttcctgctacttaaatttgaatctgagtgaattgtacctatttctgatgatgtcggtcttgcaaagcgacagattcataaagtaatgatgaaatctttctttcttcccgtgtgtatttctaagaaatagagccaactgattttgtatgtaaataccaagagcaatttacctggtactaaacccgcaccccagtgcggacccttcccagccctcatcccacttcctttcctactgtcctggaacctgtctccattgtgtgatccagccctggttctggctgtggtcagcagatgccagtgaagggttttgtgtgtttaggcctcatttctttgtctttttcctactccgttcctggcatttgctgatttctagtgtatactctgtagtctcagttcgtgtttgattccattccatggaaataaaaagtatgttgtacatactgccgaagaattgtcttgcaagttaaggcttccccctttactataagactataaataaaaacttattttatccttaaaaaaaaaaaaaaaaaaaaaaaaaaaaaaaaaaaaaaaaaaaaaaaaaaaaaaaaaaaaaaaaaa

SEQ ID NO: 2657 - protein, 151 aa, Homo sapiens
MSDNDDIEVESDADKRAHHNALERKRRDHIKDSFHSLRDSVPSLQGEKASRAQILDKATEYIQYMRRKNHTHQQDIDDLKRQNALLEQQVRALEKARSSAQLQTNYPSSDNSLYTNAKGSTISAFDGGSDSSSESEPEEPQSRKKLRMEAS

SEQ ID NO: 2658 - DNA, 2169 bp, Homo sapiens
ggtggttcttgcccgtgttgtgtgtgtgtgtgagtgagagagcgagtgagtgagtgagtgagtgtgtgtgtgggggggactcggcttgttgttgtcggtgacttccccctccccttcaccccttcccctccccgccgccgctgcagtggccgctccctgggccgtaggaaatgagcgataacgatgacatcgaggtggagagcgacgaagagcaaccgaggtttcaatctgcggctgacaaacgggctcatcataatgcactggaacgaaaacgtagggaccacatcaaagacagctttcacagtttgcgggactcagtcccatcactccaaggagagaaggcatcccgggcccaaatcctagacaaagccacagaatatatccagtatatgcgaaggaaaaaccacacacaccagcaagatattgacgacctcaagcggcagaatgctcttctggagcagcaaggggaaagcgagagctgatcaagttctttgttcctggggaattcacttctcttcctccctcatggaagatgcaagtaaaaggaaatgcaagtaaccacctggtccgtgcactggagaaggcgaggtcaagtgcccaactgcagaccaactacccctcctcagacaacagcctctacaccaacgccaagggcagcaccatctctgccttcgatgggggctcggactccagctcggagtctgagcctgaagagccccaaagcaggaagaagctccggatggaggccagctaagccactcggggcaggccagcaataaaaactgtctgtctccatcgtctcatcctcctttcagttcgttggtagagccctcagaaccatttaagagactctttatttttctctttctcccttttttttttaaatttttatttttacgtagaagctcttggacaacagctctcgttctccttccccatttccactgtatattttttaatgtattcccttcagggattccctgtccccaacaggaatttttaaaccaaaacaccccaacttggcagctttttctgtggaggacagacggccggccggacctctgagcacatagtgtcctgcccaccctaccagctcctccagccctgccgggcacatgcccgggggacgcctgccctgcccaggtggcctcctggcccgccctcacctctgatagactttgtgaatctgaactgctctactttgagaagatgaccggtttggagtaatcagaatgaaccctcctcctttttaagggttttttttttttcctttttctaaaaagctatgtatcgctcctattgaaagaccagatccttagagaagtttgtggtataaaaaggaagtggggacagattcgcagcacagagtcgctggcatgtttcactcctgcttctctcagccagctgtttaagcctgcggcgccagcctcacggagggccgtgtgacactctcgtggtatgtatgggagatggcagcagtgaagcagcagccaccagggagtggccatttggggttgggacagggagggtgttttgggtggcatagaggttttgtattgagggccagtgatgatgttttgatatttatttcctgctacttaaatttgaatctgagtgaattgtacctatttctgatgatgtcggtcttgcaaagcgacagattcataaagtaatgatgaaatctttctttcttcccgtgtgtatttctaagaaatagagccaactgattttgtatgtaaataccaagagcaatttacctggtactaaacccgcaccccagtgcggacccttcccagccctcatcccacttcctttcctactgtcctggaacctgtctccattgtgtgatccagccctggttctggctgtggtcagcagatgccagtgaagggttttgtgtgtttaggcctcatttctttgtctttttcctactccgttcctggcatttgctgatttctagtgtatactctgtagtctcagttcgtgtttgattccattccatggaaataaaaagtatgttgtacatactgccgaagaattgtcttgcaagttaaggcttccccctttactataagactataaataaaaacttattttatccttaaaaaaaaaaaaaaaaaaaaaaaaaaaaaaaaaaaaaaaaaaaaaaaaaaaaaaaaaaaaaaaaaa

SEQ ID NO: 2659 - DNA, 942 bp, Homo sapiens
ggtggttcttgcccgtgttgtgtgtgtgtgtgagtgagagagcgagtgagtgagtgagtgagtgtgtgtgtgggggggactcggcttgttgttgtcggtgacttccccctccccttcaccccttcccctccccgccgccgctgcagtggccgctccctgggccgtaggaaatgagcgataacgatgacatcgaggtggagagcgacgaagagcaaccgaggtttcaatctgcggctgacaaacgggctcatcataatgcactggaacgaaaacgtagggaccacatcaaagacagctttcacagtttgcgggactcagtcccatcactccaaggagagaagctctatttcctcttttggaaattgtgtactcctgtccttcatcgtcaaagtttgatgcagaaatgccacaccttcatttcaagctaccaagtgcacaagaaaaaagaatgcaagatttaaaaaatgattgttttgaccccttacacaaatgtcttactcctggctttaattaagctgcttgagggctgatagctctgccttaccctggtaatcagcaaaatggtcctgtggctggggaggccctggcagcaggaagccttcaaggagccatgggtctgtgctgactctggccttacaaccttccagcctcctttgctggcattgatggggttccatttttgaatgaactagtttaatgtggatccaaatttattgtgcatattctttcgttttggttttcaaaagatggcttattcacatggaaatgtacaccagtttagccctgggccctccctttaccttcatatgtgtaaaagcttacacaggtttcagaaaataaatggtttcattttctctaaaataactagtacaaaataaaacagatgtcagttgttgaaaaaaaaaaaaaaaaaaaaaaaaaaaaaaaaaaaaaaaaaaaaaa

SEQ ID NO: 2660 - protein, 96 aa, Homo sapiens
MSDNDDIEVESDEEQPRFQSAADKRAHHNALERKRRDHIKDSFHSLRDSVPSLQGEKLYFLFWKLCTPVLHRQSLMQKCHTFISSYQVHKKKECKI

SEQ ID NO: 2661 - DNA, 575 bp, Homo sapiens
ggtggttcttgcccgtgttgtgtgtgtgtgtgagtgagagagcgagtgagtgagtgagtgagtgtgtgtgtgggggggactcggcttgttgttgtcggtgacttccccctccccttcaccccttcccctccccgccgccgctgcagtggccgctccctgggccgtaggaaatgagcgataacgatgacatcgaggtggagagcgacgaagagcaaccgaggtttcaatctgcggctgacaaacgggctcatcataatgcactggaacgaaaacgtagggaccacatcaaagacagctttcacagtttgcgggactcagtcccatcactccaaggagagaaggcatcccgggcccaaatcctagacaaagccacagaatatatccagtatatgcgaaggaaaaaccacacacaccagcaagatattgacgacctcaagcggcagaatgctcttctggagcagcaaggtgagcacccgagctcgtggggcagctggccctgctgtgctccagccaggtcaggctttggcacctgggcctgcagagtcagagccagtcatggagtatgtgctcagtag

SEQ ID NO: 2662 - protein, 134 aa, Homo sapiens
MSDNDDIEVESDEEQPRFQSAADKRAHHNALERKRRDHIKDSFHSLRDSVPSLQGEKASRAQILDKATEYIQYMRRKNHTHQQDIDDLKRQNALLEQQGEHPSSWGSWPCCAPARSGFGTWACRVRASHGVCAQ

SEQ ID NO: 2663 - DNA, 597 bp, Homo sapiens
agctgaagttgaggatctcttactctctaagccacggaattaacccgagcaggcatggaggcctctgctctcacctcatcagcagtgaccagtgtggccaaagtggtcagggtggcctctggctctgccgtagttttgcccctggccaggattgctacagttgtgattggaggagttgtggccatggcggctgtgcccatggtgctcagtgccatgggcttcactgcggcgggaatcgcctcgtcctccatagcagccaagatgatgtccgcggcggccattgccaatgggggtggagttgcctcgggcagccttgtgggtactctgcagtcactgggagcaactggactctccggattgaccaagttcatcctgggctccattgggtctgccattgcggctgtcattgcgaggttctactagctccctgcccctcgccctgcagagaagagaaccatgccaggggagaaggcacccagccatcctgacccagcgaggagccaactatcccaaatatacctgggtgaaatataccaaattctgcatctccagaggaaaataagaaataaagatgaattgttgcaactcttaaaaaaa

SEQ ID NO: 2664 - protein, 122 aa, Homo sapiens
MEASALTSSAVTSVAKVVRVASGSAVVLPLARIATVVIGGVVAMAAVPMVLSAMGFTAAGIASSSIAAKMMSAAAIANGGGVASGSLVGTLQSLGATGLSGLTKFILGSIGSAIAAVIARFY

SEQ ID NO: 2665 - DNA, 2787 bp, Homo sapiens
ggtgtccggagccgcggacctagagatcccagaagccacagcgcagcggcccggcccgccactatttccaggctctgcggggcaggggccgccgcccaccgcccgccgccatggggctgaaggccgcccagaagacgctgttcccgctgcgctccatcgacgacgtggtgcgcctgtttgctgccgagctgggccgagaggagccggacctggtgctcctttccttggtgctgggcttcgtggagcattttctggctgtcaaccgcgtcatccctaccaacgttcccgagctcaccttccagcccagccccgcccccgacccgcctggcggcctcacctactttcccgtggccgacctgtctatcatcgccgccctctatgcccgcttcaccgcccagatccgaggcgccgtcgacctgtccctctatcctcgagaagggggtgtctccagccgtgagctggtgaagaaggtctccgatgtcatatggaacagcctcagccgctcctacttcaaggatcgggcccacatccagtccctcttcagcttcatcacaggctggagcccagtaggcaccaaattggacagctccggtgtggcctttgctgtggttggggcctgccaggccctgggtctccgggatgtccacctcgccctgtctgaggatcatgcctgggtagtgtttgggcccaatggggagcagacagctgaggtcacctggcacggcaagggcaacgaggaccgcaggggccagacagtcaatgccggtgtggctgagcggagctggctgtacctgaaaggatcatacatgcgctgtgaccgcaagatggaggtggcgttcatggtgtgtgccatcaacccttccattgacctgcacaccgactcgctggagcttctgcagctgcagcagaagctgctctggctgctctatgacctgggacatctggaaaggtaccccatggccttagggaacctggcagatctagaggagctggagcccacccctggccggccagacccactcaccctctaccacaagggcattgcctcagccaagacctactatcgggatgaacacatctacccctacatgtacctggctggctaccactgtcgcaaccgcaatgtgcgggaagccctgcaggcctgggcggacacggccactgtcatccaggactacaactactgccgggaagacgaggagatctacaaggagttctttgaagtagccaatgatgtcatccccaacctgctgaaggaggcagccagcttgctggaggcgggcgaggagcggccgggggagcaaagccagggcacccagagccaaggttccgccctccaggaccctgagtgcttcgcccacctgctgcgattctacgacggcatctgcaaatgggaggagggcagtcccacgcctgtgctgcacgtgggctgggccacctttcttgtgcagtccctaggccgttttgagggacaggtgcggcagaaggtgcgcatagtgagccgagaggccgaggcggccgaggccgaggagccgtggggcgaggaagcccgggaaggccggcggcggggcccacggcgggagtccaagccagaggagcccccgccgcccaagaagccagcactggacaagggcctgggcaccggccagggtgcagtgtcaggacccccccggaagcctcctgggactgtcgctggcacagcccgaggccctgaaggtggcagcacggctcaggtgccagcacccgcagcatcaccaccgccggagggtccagtgctcactttccagagtgagaagatgaagggcatgaaggagctgctggtggccaccaagatcaactcgagcgccatcaagctgcaactcacggcacagtcgcaagtgcagatgaagaagcagaaagtgtccacccctagtgactacactctgtctttcctcaagcggcagcgcaaaggcctctgaactactggggacttcggaccgcttgtggggacccaggctccgccttagtcccccaactctgagcccatgttctgcccccagcccaaaggggacaggcctcacctctacccaaaccctaggttcccggtcccgagtacagtctgtatcaaacccacgattttctccagctcagaacccagggctctgccccagtcgttagaatataggtctcttctcccagaatcccagccggccaatggaaacctcacgctgggtcctaattaccagtctttaaaggcccagcccctagaaacccaagctcctcctcggaaccgctcacctagagccagaccaacgttactcagggctcctcccagcttgtaggagctgaggtttcacccttaacccaagggagcacaggtcccacctccagcccggggagcctaggaccactcagcccctaggagtatatttccgcacttcagaattccatatcttgcgaatccaagctccctgccccaaataacttcagtcctgcttccagaatttggaaatcctagtttcctctccttcgtatcccgagtctgggacacaaaactccgcccccagcctatgagcatcctgagccccgccctcttcctgacgaaactggccccggatcagagcaggacctcccttccgaccctctgggaacctcccagaggtccagcccatctcggagcatcccggaggaaatctgcagaggggttaggagtgggtgacaagagcctgatctcttcctgttttgtacatagatttatttttcagttccaagaaagatgaatacattttgttaaaaaaaaaaaaaaaa

SEQ ID NO: 2666 - protein, 615 aa, Homo sapiens
MGLKAAQKTLFPLRSIDDVVRLFAAELGREEPDLVLLSLVLGFVEHFLAVNRVIPTNVPELTFQPSPAPDPPGGLTYFPVADLSIIAALYARFTAQIRGAVDLSLYPREGGVSSRELVKKVSDVIWNSLSRSYFKDRAHIQSLFSFITGWSPVGTKLDSSGVAFAVVGACQALGLRDVHLALSEDHAWVVFGPNGEQTAEVTWHGKGNEDRRGQTVNAGVAERSWLYLKGSYMRCDRKMEVAFMVCAINPSIDLHTDSLELLQLQQKLLWLLYDLGHLERYPMALGNLADLEELEPTPGRPDPLTLYHKGIASAKTYYRDEHIYPYMYLAGYHCRNRNVREALQAWADTATVIQDYNYCREDEEIYKEFFEVANDVIPNLLKEAASLLEAGEERPGEQSQGTQSQGSALQDPECFAHLLRFYDGICKWEEGSPTPVLHVGWATFLVQSLGRFEGQVRQKVRIVSREAEAAEAEEPWGEEAREGRRRGPRRESKPEEPPPPKKPALDKGLGTGQGAVSGPPRKPPGTVAGTARGPEGGSTAQVPAPAASPPPEGPVLTFQSEKMKGMKELLVATKINSSAIKLQLTAQSQVQMKKQKVSTPSDYTLSFLKRQRKGL

SEQ ID NO: 2667 - DNA, 2772 bp, Homo sapiens
ggtgtccggagccgcggacctagagatcccagaagccacagcgcagcggcccggcccgccactatttccaggctctgcggggcaggggccgccgcccaccgcccgccgccatggggctgaaggccgcccagaagacgctgttcccgctgcgctccatcgacgacgtggtgcgcctgtttgctgccgagctgggccgagaggagccggacctggtgctcctttccttggtgctgggcttcgtggagcattttctggctgtcaaccgcgtcatccctaccaacgttcccgagctcaccttccagcccagccccgcccccgacccgcctggcggcctcacctactttcccgtggccgacctgtctatcatcgccgccctctatgcccgcttcaccgcccagatccgaggcgccgtcgacctgtccctctatcctcgagaagggggtgtctccagccgtgagctggtgaagaaggtctccgatgtcatatggaacagcctcagccgctcctacttcaaggatcgggcccacatccagtccctcttcagcttcatcacaggcaccaaattggacagctccggtgtggcctttgctgtggttggggcctgccaggccctgggtctccgggatgtccacctcgccctgtctgaggatcatgcctgggtagtgtttgggcccaatggggagcagacagctgaggtcacctggcacggcaagggcaacgaggaccgcaggggccagacagtcaatgccggtgtggctgagcggagctggctgtacctgaaaggatcatacatgcgctgtgaccgcaagatggaggtggcgttcatggtgtgtgccatcaacccttccattgacctgcacaccgactcgctggagcttctgcagctgcagcagaagctgctctggctgctctatgacctgggacatctggaaaggtaccccatggccttagggaacctggcagatctagaggagctggagcccacccctggccggccagacccactcaccctctaccacaagggcattgcctcagccaagacctactatcgggatgaacacatctacccctacatgtacctggctggctaccactgtcgcaaccgcaatgtgcgggaagccctgcaggcctgggcggacacggccactgtcatccaggactacaactactgccgggaagacgaggagatctacaaggagttctttgaagtagccaatgatgtcatccccaacctgctgaaggaggcagccagcttgctggaggcgggcgaggagcggccgggggagcaaagccagggcacccagagccaaggttccgccctccaggaccctgagtgcttcgcccacctgctgcgattctacgacggcatctgcaaatgggaggagggcagtcccacgcctgtgctgcacgtgggctgggccacctttcttgtgcagtccctaggccgttttgagggacaggtgcggcagaaggtgcgcatagtgagccgagaggccgaggcggccgaggccgaggagccgtggggcgaggaagcccgggaaggccggcggcggggcccacggcgggagtccaagccagaggagcccccgccgcccaagaagccagcactggacaagggcctgggcaccggccagggtgcagtgtcaggacccccccggaagcctcctgggactgtcgctggcacagcccgaggccctgaaggtggcagcacggctcaggtgccagcacccgcagcatcaccaccgccggagggtccagtgctcactttccagagtgagaagatgaagggcatgaaggagctgctggtggccaccaagatcaactcgagcgccatcaagctgcaactcacggcacagtcgcaagtgcagatgaagaagcagaaagtgtccacccctagtgactacactctgtctttcctcaagcggcagcgcaaaggcctctgaactactggggacttcggaccgcttgtggggacccaggctccgccttagtcccccaactctgagcccatgttctgcccccagcccaaaggggacaggcctcacctctacccaaaccctaggttcccggtcccgagtacagtctgtatcaaacccacgattttctccagctcagaacccagggctctgccccagtcgttagaatataggtctcttctcccagaatcccagccggccaatggaaacctcacgctgggtcctaattaccagtctttaaaggcccagcccctagaaacccaagctcctcctcggaaccgctcacctagagccagaccaacgttactcagggctcctcccagcttgtaggagctgaggtttcacccttaacccaagggagcacaggtcccacctccagcccggggagcctaggaccactcagcccctaggagtatatttccgcacttcagaattccatatcttgcgaatccaagctccctgccccaaataacttcagtcctgcttccagaatttggaaatcctagtttcctctccttcgtatcccgagtctgggacacaaaactccgcccccagcctatgagcatcctgagccccgccctcttcctgacgaaactggccccggatcagagcaggacctcccttccgaccctctgggaacctcccagaggtccagcccatctcggagcatcccggaggaaatctgcagaggggttaggagtgggtgacaagagcctgatctcttcctgttttgtacatagatttatttttcagttccaagaaagatgaatacattttgttaaaaaaaaaaaaaaaa

SEQ ID NO: 2668 - protein, 610 aa, Homo sapiens
MGLKAAQKTLFPLRSIDDVVRLFAAELGREEPDLVLLSLVLGFVEHFLAVNRVIPTNVPELTFQPSPAPDPPGGLTYFPVADLSIIAALYARFTAQIRGAVDLSLYPREGGVSSRELVKKVSDVIWNSLSRSYFKDRAHIQSLFSFITGTKLDSSGVAFAVVGACQALGLRDVHLALSEDHAWVVFGPNGEQTAEVTWHGKGNEDRRGQTVNAGVAERSWLYLKGSYMRCDRKMEVAFMVCAINPSIDLHTDSLELLQLQQKLLWLLYDLGHLERYPMALGNLADLEELEPTPGRPDPLTLYHKGIASAKTYYRDEHIYPYMYLAGYHCRNRNVREALQAWADTATVIQDYNYCREDEEIYKEFFEVANDVIPNLLKEAASLLEAGEERPGEQSQGTQSQGSALQDPECFAHLLRFYDGICKWEEGSPTPVLHVGWATFLVQSLGRFEGQVRQKVRIVSREAEAAEAEEPWGEEAREGRRRGPRRESKPEEPPPPKKPALDKGLGTGQGAVSGPPRKPPGTVAGTARGPEGGSTAQVPAPAASPPPEGPVLTFQSEKMKGMKELLVATKINSSAIKLQLTAQSQVQMKKQKVSTPSDYTLSFLKRQRKGL

SEQ ID NO: 2669 - DNA, 2750 bp, Homo sapiens
gctccgggcggcgtgcgccgcggtgcctagtgtgggatgtaagcgcggaggccgccgcccaccgcccgccgccatggggctgaaggccgcccagaagacgctgttcccgctgcgctccatcgacgacgtggtgcgcctgtttgctgccgagctgggccgagaggagccggacctggtgctcctttccttggtgctgggcttcgtggagcattttctggctgtcaaccgcgtcatccctaccaacgttcccgagctcaccttccagcccagccccgcccccgacccgcctggcggcctcacctactttcccgtggccgacctgtctatcatcgccgccctctatgcccgcttcaccgcccagatccgaggcgccgtcgacctgtccctctatcctcgagaagggggtgtctccagccgtgagctggtgaagaaggtctccgatgtcatatggaacagcctcagccgctcctacttcaaggatcgggcccacatccagtccctcttcagcttcatcacaggctggagcccagtaggcaccaaattggacagctccggtgtggcctttgctgtggttggggcctgccaggccctgggtctccgggatgtccacctcgccctgtctgaggatcatgcctgggtagtgtttgggcccaatggggagcagacagctgaggtcacctggcacggcaagggcaacgaggaccgcaggggccagacagtcaatgccggtgtggctgagcggagctggctgtacctgaaaggatcatacatgcgctgtgaccgcaagatggaggtggcgttcatggtgtgtgccatcaacccttccattgacctgcacaccgactcgctggagcttctgcagctgcagcagaagctgctctggctgctctatgacctgggacatctggaaaggtaccccatggccttagggaacctggcagatctagaggagctggagcccacccctggccggccagacccactcaccctctaccacaagggcattgcctcagccaagacctactatcgggatgaacacatctacccctacatgtacctggctggctaccactgtcgcaaccgcaatgtgcgggaagccctgcaggcctgggcggacacggccactgtcatccaggactacaactactgccgggaagacgaggagatctacaaggagttctttgaagtagccaatgatgtcatccccaacctgctgaaggaggcagccagcttgctggaggcgggcgaggagcggccgggggagcaaagccagggcacccagagccaaggttccgccctccaggaccctgagtgcttcgcccacctgctgcgattctacgacggcatctgcaaatgggaggagggcagtcccacgcctgtgctgcacgtgggctgggccacctttcttgtgcagtccctaggccgttttgagggacaggtgcggcagaaggtgcgcatagtgagccgagaggccgaggcggccgaggccgaggagccgtggggcgaggaagcccgggaaggccggcggcggggcccacggcgggagtccaagccagaggagcccccgccgcccaagaagccagcactggacaagggcctgggcaccggccagggtgcagtgtcaggacccccccggaagcctcctgggactgtcgctggcacagcccgaggccctgaaggtggcagcacggctcaggtgccagcacccgcagcatcaccaccgccggagggtccagtgctcactttccagagtgagaagatgaagggcatgaaggagctgctggtggccaccaagatcaactcgagcgccatcaagctgcaactcacggcacagtcgcaagtgcagatgaagaagcagaaagtgtccacccctagtgactacactctgtctttcctcaagcggcagcgcaaaggcctctgaactactggggacttcggaccgcttgtggggacccaggctccgccttagtcccccaactctgagcccatgttctgcccccagcccaaaggggacaggcctcacctctacccaaaccctaggttcccggtcccgagtacagtctgtatcaaacccacgattttctccagctcagaacccagggctctgccccagtcgttagaatataggtctcttctcccagaatcccagccggccaatggaaacctcacgctgggtcctaattaccagtctttaaaggcccagcccctagaaacccaagctcctcctcggaaccgctcacctagagccagaccaacgttactcagggctcctcccagcttgtaggagctgaggtttcacccttaacccaagggagcacaggtcccacctccagcccggggagcctaggaccactcagcccctaggagtatatttccgcacttcagaattccatatcttgcgaatccaagctccctgccccaaataacttcagtcctgcttccagaatttggaaatcctagtttcctctccttcgtatcccgagtctgggacacaaaactccgcccccagcctatgagcatcctgagccccgccctcttcctgacgaaactggccccggatcagagcaggacctcccttccgaccctctgggaacctcccagaggtccagcccatctcggagcatcccggaggaaatctgcagaggggttaggagtgggtgacaagagcctgatctcttcctgttttgtacatagatttatttttcagttccaagaaagatgaatacattttgttaaaaaaaaaaaaaaaa

SEQ ID NO: 2670 - DNA, 2738 bp, Homo sapiens
gctccgggcggcgtgcgccgcggtgcctagtgtgggatgccgccgcccaccgcccgccgccatggggctgaaggccgcccagaagacgctgttcccgctgcgctccatcgacgacgtggtgcgcctgtttgctgccgagctgggccgagaggagccggacctggtgctcctttccttggtgctgggcttcgtggagcattttctggctgtcaaccgcgtcatccctaccaacgttcccgagctcaccttccagcccagccccgcccccgacccgcctggcggcctcacctactttcccgtggccgacctgtctatcatcgccgccctctatgcccgcttcaccgcccagatccgaggcgccgtcgacctgtccctctatcctcgagaagggggtgtctccagccgtgagctggtgaagaaggtctccgatgtcatatggaacagcctcagccgctcctacttcaaggatcgggcccacatccagtccctcttcagcttcatcacaggctggagcccagtaggcaccaaattggacagctccggtgtggcctttgctgtggttggggcctgccaggccctgggtctccgggatgtccacctcgccctgtctgaggatcatgcctgggtagtgtttgggcccaatggggagcagacagctgaggtcacctggcacggcaagggcaacgaggaccgcaggggccagacagtcaatgccggtgtggctgagcggagctggctgtacctgaaaggatcatacatgcgctgtgaccgcaagatggaggtggcgttcatggtgtgtgccatcaacccttccattgacctgcacaccgactcgctggagcttctgcagctgcagcagaagctgctctggctgctctatgacctgggacatctggaaaggtaccccatggccttagggaacctggcagatctagaggagctggagcccacccctggccggccagacccactcaccctctaccacaagggcattgcctcagccaagacctactatcgggatgaacacatctacccctacatgtacctggctggctaccactgtcgcaaccgcaatgtgcgggaagccctgcaggcctgggcggacacggccactgtcatccaggactacaactactgccgggaagacgaggagatctacaaggagttctttgaagtagccaatgatgtcatccccaacctgctgaaggaggcagccagcttgctggaggcgggcgaggagcggccgggggagcaaagccagggcacccagagccaaggttccgccctccaggaccctgagtgcttcgcccacctgctgcgattctacgacggcatctgcaaatgggaggagggcagtcccacgcctgtgctgcacgtgggctgggccacctttcttgtgcagtccctaggccgttttgagggacaggtgcggcagaaggtgcgcatagtgagccgagaggccgaggcggccgaggccgaggagccgtggggcgaggaagcccgggaaggccggcggcggggcccacggcgggagtccaagccagaggagcccccgccgcccaagaagccagcactggacaagggcctgggcaccggccagggtgcagtgtcaggacccccccggaagcctcctgggactgtcgctggcacagcccgaggccctgaaggtggcagcacggctcaggtgccagcacccgcagcatcaccaccgccggagggtccagtgctcactttccagagtgagaagatgaagggcatgaaggagctgctggtggccaccaagatcaactcgagcgccatcaagctgcaactcacggcacagtcgcaagtgcagatgaagaagcagaaagtgtccacccctagtgactacactctgtctttcctcaagcggcagcgcaaaggcctctgaactactggggacttcggaccgcttgtggggacccaggctccgccttagtcccccaactctgagcccatgttctgcccccagcccaaaggggacaggcctcacctctacccaaaccctaggttcccggtcccgagtacagtctgtatcaaacccacgattttctccagctcagaacccagggctctgccccagtcgttagaatataggtctcttctcccagaatcccagccggccaatggaaacctcacgctgggtcctaattaccagtctttaaaggcccagcccctagaaacccaagctcctcctcggaaccgctcacctagagccagaccaacgttactcagggctcctcccagcttgtaggagctgaggtttcacccttaacccaagggagcacaggtcccacctccagcccggggagcctaggaccactcagcccctaggagtatatttccgcacttcagaattccatatcttgcgaatccaagctccctgccccaaataacttcagtcctgcttccagaatttggaaatcctagtttcctctccttcgtatcccgagtctgggacacaaaactccgcccccagcctatgagcatcctgagccccgccctcttcctgacgaaactggccccggatcagagcaggacctcccttccgaccctctgggaacctcccagaggtccagcccatctcggagcatcccggaggaaatctgcagaggggttaggagtgggtgacaagagcctgatctcttcctgttttgtacatagatttatttttcagttccaagaaagatgaatacattttgttaaaaaaaaaaaaaaaa

SEQ ID NO: 2671 - DNA, 3174 bp, Homo sapiens
caatccctgagtatctcgggaaggaggtgtccggagccgcggacctagagatcccagaagccacagcgcagcggcccggcccgccactatttccaggctctgcggggcaggggtgggcccagactccacttcccggcgggtagtgcgaccctaggggcgggacttcatgtcccagcaggctccgggcggcgtgcgccgcggtgcctagtgtgggatgtaagcgcggaggtgggcgagggggaccgaggccaggactctccttggggtttgggggcttgacctgggtgcgctttctggacagactttacagccccgggggcacagtcgtagagagggggcggggcggccattggggctcctcattggggtgcttggggcgcaccccatcgggtaccgggcgtcccggaattgtgggggacaaaaaggctctgcagtctcggctgaggggtctcaccgacaaaagaaggggaagccgccgccgcccaccgcccgccgccatggggctgaaggccgcccagaagacgctgttcccgctgcgctccatcgacgacgtggtgcgcctgtttgctgccgagctgggccgagaggagccggacctggtgctcctttccttggtgctgggcttcgtggagcattttctggctgtcaaccgcgtcatccctaccaacgttcccgagctcaccttccagcccagccccgcccccgacccgcctggcggcctcacctactttcccgtggccgacctgtctatcatcgccgccctctatgcccgcttcaccgcccagatccgaggcgccgtcgacctgtccctctatcctcgagaagggggtgtctccagccgtgagctggtgaagaaggtctccgatgtcatatggaacagcctcagccgctcctacttcaaggatcgggcccacatccagtccctcttcagcttcatcacaggctggagcccagtaggcaccaaattggacagctccggtgtggcctttgctgtggttggggcctgccaggccctgggtctccgggatgtccacctcgccctgtctgaggatcatgcctgggtagtgtttgggcccaatggggagcagacagctgaggtcacctggcacggcaagggcaacgaggaccgcaggggccagacagtcaatgccggtgtggctgagcggagctggctgtacctgaaaggatcatacatgcgctgtgaccgcaagatggaggtggcgttcatggtgtgtgccatcaacccttccattgacctgcacaccgactcgctggagcttctgcagctgcagcagaagctgctctggctgctctatgacctgggacatctggaaaggtaccccatggccttagggaacctggcagatctagaggagctggagcccacccctggccggccagacccactcaccctctaccacaagggcattgcctcagccaagacctactatcgggatgaacacatctacccctacatgtacctggctggctaccactgtcgcaaccgcaatgtgcgggaagccctgcaggcctgggcggacacggccactgtcatccaggactacaactactgccgggaagacgaggagatctacaaggagttctttgaagtagccaatgatgtcatccccaacctgctgaaggaggcagccagcttgctggaggcgggcgaggagcggccgggggagcaaagccagggcacccagagccaaggttccgccctccaggaccctgagtgcttcgcccacctgctgcgattctacgacggcatctgcaaatgggaggagggcagtcccacgcctgtgctgcacgtgggctgggccacctttcttgtgcagtccctaggccgttttgagggacaggtgcggcagaaggtgcgcatagtgagccgagaggccgaggcggccgaggccgaggagccgtggggcgaggaagcccgggaaggccggcggcggggcccacggcgggagtccaagccagaggagcccccgccgcccaagaagccagcactggacaagggcctgggcaccggccagggtgcagtgtcaggacccccccggaagcctcctgggactgtcgctggcacagcccgaggccctgaaggtggcagcacggctcaggtgccagcacccgcagcatcaccaccgccggagggtccagtgctcactttccagagtgagaagatgaagggcatgaaggagctgctggtggccaccaagatcaactcgagcgccatcaagctgcaactcacggcacagtcgcaagtgcagatgaagaagcagaaagtgtccacccctagtgactacactctgtctttcctcaagcggcagcgcaaaggcctctgaactactggggacttcggaccgcttgtggggacccaggctccgccttagtcccccaactctgagcccatgttctgcccccagcccaaaggggacaggcctcacctctacccaaaccctaggttcccggtcccgagtacagtctgtatcaaacccacgattttctccagctcagaacccagggctctgccccagtcgttagaatataggtctcttctcccagaatcccagccggccaatggaaacctcacgctgggtcctaattaccagtctttaaaggcccagcccctagaaacccaagctcctcctcggaaccgctcacctagagccagaccaacgttactcagggctcctcccagcttgtaggagctgaggtttcacccttaacccaagggagcacaggtcccacctccagcccggggagcctaggaccactcagcccctaggagtatatttccgcacttcagaattccatatcttgcgaatccaagctccctgccccaaataacttcagtcctgcttccagaatttggaaatcctagtttcctctccttcgtatcccgagtctgggacacaaaactccgcccccagcctatgagcatcctgagccccgccctcttcctgacgaaactggccccggatcagagcaggacctcccttccgaccctctgggaacctcccagaggtccagcccatctcggagcatcccggaggaaatctgcagaggggttaggagtgggtgacaagagcctgatctcttcctgttttgtacatagatttatttttcagttccaagaaagatgaatacattttgttaaaaaaaaaaaaaaaa

SEQ ID NO: 2672 - DNA, 3181 bp, Homo sapiens
tatatttatgtatatgcacatacacacaaaattaggcgggagtggtggcgcacgcctgtgatcacagctactcgggaggctgaggcacgagaatcgcttgagcccgtgaagtcgaggctgcagtgagcccagatcgagccactgcattccagcctgggcgaaagagaaagaccgtgtctcaaaacaaacaaacaaaagctactcttagcacgtgttagagtatctcgcgggcggaagtgggaaacgagtgctgcacacagagtaggcatctttatatgttaacagacactgatacccagctaaagcggctgaacacatttactctctggcagtgtttaaaagtatctgtttttctcatattgttttattttaattttttctggatcaagcaacctgatctttttcctcataacttgccgaccgacccgtgacagcaaaaccggcagaagctcggcgacctcccaccccgagtctgcaggtagccgccgcccaccgcccgccgccatggggctgaaggccgcccagaagacgctgttcccgctgcgctccatcgacgacgtggtgcgcctgtttgctgccgagctgggccgagaggagccggacctggtgctcctttccttggtgctgggcttcgtggagcattttctggctgtcaaccgcgtcatccctaccaacgttcccgagctcaccttccagcccagccccgcccccgacccgcctggcggcctcacctactttcccgtggccgacctgtctatcatcgccgccctctatgcccgcttcaccgcccagatccgaggcgccgtcgacctgtccctctatcctcgagaagggggtgtctccagccgtgagctggtgaagaaggtctccgatgtcatatggaacagcctcagccgctcctacttcaaggatcgggcccacatccagtccctcttcagcttcatcacaggctggagcccagtaggcaccaaattggacagctccggtgtggcctttgctgtggttggggcctgccaggccctgggtctccgggatgtccacctcgccctgtctgaggatcatgcctgggtagtgtttgggcccaatggggagcagacagctgaggtcacctggcacggcaagggcaacgaggaccgcaggggccagacagtcaatgccggtgtggctgagcggagctggctgtacctgaaaggatcatacatgcgctgtgaccgcaagatggaggtggcgttcatggtgtgtgccatcaacccttccattgacctgcacaccgactcgctggagcttctgcagctgcagcagaagctgctctggctgctctatgacctgggacatctggaaaggtaccccatggccttagggaacctggcagatctagaggagctggagcccacccctggccggccagacccactcaccctctaccacaagggcattgcctcagccaagacctactatcgggatgaacacatctacccctacatgtacctggctggctaccactgtcgcaaccgcaatgtgcgggaagccctgcaggcctgggcggacacggccactgtcatccaggactacaactactgccgggaagacgaggagatctacaaggagttctttgaagtagccaatgatgtcatccccaacctgctgaaggaggcagccagcttgctggaggcgggcgaggagcggccgggggagcaaagccagggcacccagagccaaggttccgccctccaggaccctgagtgcttcgcccacctgctgcgattctacgacggcatctgcaaatgggaggagggcagtcccacgcctgtgctgcacgtgggctgggccacctttcttgtgcagtccctaggccgttttgagggacaggtgcggcagaaggtgcgcatagtgagccgagaggccgaggcggccgaggccgaggagccgtggggcgaggaagcccgggaaggccggcggcggggcccacggcgggagtccaagccagaggagcccccgccgcccaagaagccagcactggacaagggcctgggcaccggccagggtgcagtgtcaggacccccccggaagcctcctgggactgtcgctggcacagcccgaggccctgaaggtggcagcacggctcaggtgccagcacccgcagcatcaccaccgccggagggtccagtgctcactttccagagtgagaagatgaagggcatgaaggagctgctggtggccaccaagatcaactcgagcgccatcaagctgcaactcacggcacagtcgcaagtgcagatgaagaagcagaaagtgtccacccctagtgactacactctgtctttcctcaagcggcagcgcaaaggcctctgaactactggggacttcggaccgcttgtggggacccaggctccgccttagtcccccaactctgagcccatgttctgcccccagcccaaaggggacaggcctcacctctacccaaaccctaggttcccggtcccgagtacagtctgtatcaaacccacgattttctccagctcagaacccagggctctgccccagtcgttagaatataggtctcttctcccagaatcccagccggccaatggaaacctcacgctgggtcctaattaccagtctttaaaggcccagcccctagaaacccaagctcctcctcggaaccgctcacctagagccagaccaacgttactcagggctcctcccagcttgtaggagctgaggtttcacccttaacccaagggagcacaggtcccacctccagcccggggagcctaggaccactcagcccctaggagtatatttccgcacttcagaattccatatcttgcgaatccaagctccctgccccaaataacttcagtcctgcttccagaatttggaaatcctagtttcctctccttcgtatcccgagtctgggacacaaaactccgcccccagcctatgagcatcctgagccccgccctcttcctgacgaaactggccccggatcagagcaggacctcccttccgaccctctgggaacctcccagaggtccagcccatctcggagcatcccggaggaaatctgcagaggggttaggagtgggtgacaagagcctgatctcttcctgttttgtacatagatttatttttcagttccaagaaagatgaatacattttgttaaaaaaaaaaaaaaaa

SEQ ID NO: 2673 - DNA, 3053 bp, Homo sapiens
tatatttatgtatatgcacatacacacaaaattaggcgggagtggtggcgcacgcctgtgatcacagctactcgggaggctgaggcacgagaatcgcttgagcccgtgaagtcgaggctgcagtgagcccagatcgagccactgcattccagcctgggcgaaagagaaagaccgtgtctcaaaacaaacaaacaaaagctactcttagcacgtgttagagtatctcgcgggcggaagtgggaaacgagtgctgcacacagacaacctgatctttttcctcataacttgccgaccgacccgtgacagcaaaaccggcagaagctcggcgacctcccaccccgagtctgcaggtagccgccgcccaccgcccgccgccatggggctgaaggccgcccagaagacgctgttcccgctgcgctccatcgacgacgtggtgcgcctgtttgctgccgagctgggccgagaggagccggacctggtgctcctttccttggtgctgggcttcgtggagcattttctggctgtcaaccgcgtcatccctaccaacgttcccgagctcaccttccagcccagccccgcccccgacccgcctggcggcctcacctactttcccgtggccgacctgtctatcatcgccgccctctatgcccgcttcaccgcccagatccgaggcgccgtcgacctgtccctctatcctcgagaagggggtgtctccagccgtgagctggtgaagaaggtctccgatgtcatatggaacagcctcagccgctcctacttcaaggatcgggcccacatccagtccctcttcagcttcatcacaggctggagcccagtaggcaccaaattggacagctccggtgtggcctttgctgtggttggggcctgccaggccctgggtctccgggatgtccacctcgccctgtctgaggatcatgcctgggtagtgtttgggcccaatggggagcagacagctgaggtcacctggcacggcaagggcaacgaggaccgcaggggccagacagtcaatgccggtgtggctgagcggagctggctgtacctgaaaggatcatacatgcgctgtgaccgcaagatggaggtggcgttcatggtgtgtgccatcaacccttccattgacctgcacaccgactcgctggagcttctgcagctgcagcagaagctgctctggctgctctatgacctgggacatctggaaaggtaccccatggccttagggaacctggcagatctagaggagctggagcccacccctggccggccagacccactcaccctctaccacaagggcattgcctcagccaagacctactatcgggatgaacacatctacccctacatgtacctggctggctaccactgtcgcaaccgcaatgtgcgggaagccctgcaggcctgggcggacacggccactgtcatccaggactacaactactgccgggaagacgaggagatctacaaggagttctttgaagtagccaatgatgtcatccccaacctgctgaaggaggcagccagcttgctggaggcgggcgaggagcggccgggggagcaaagccagggcacccagagccaaggttccgccctccaggaccctgagtgcttcgcccacctgctgcgattctacgacggcatctgcaaatgggaggagggcagtcccacgcctgtgctgcacgtgggctgggccacctttcttgtgcagtccctaggccgttttgagggacaggtgcggcagaaggtgcgcatagtgagccgagaggccgaggcggccgaggccgaggagccgtggggcgaggaagcccgggaaggccggcggcggggcccacggcgggagtccaagccagaggagcccccgccgcccaagaagccagcactggacaagggcctgggcaccggccagggtgcagtgtcaggacccccccggaagcctcctgggactgtcgctggcacagcccgaggccctgaaggtggcagcacggctcaggtgccagcacccgcagcatcaccaccgccggagggtccagtgctcactttccagagtgagaagatgaagggcatgaaggagctgctggtggccaccaagatcaactcgagcgccatcaagctgcaactcacggcacagtcgcaagtgcagatgaagaagcagaaagtgtccacccctagtgactacactctgtctttcctcaagcggcagcgcaaaggcctctgaactactggggacttcggaccgcttgtggggacccaggctccgccttagtcccccaactctgagcccatgttctgcccccagcccaaaggggacaggcctcacctctacccaaaccctaggttcccggtcccgagtacagtctgtatcaaacccacgattttctccagctcagaacccagggctctgccccagtcgttagaatataggtctcttctcccagaatcccagccggccaatggaaacctcacgctgggtcctaattaccagtctttaaaggcccagcccctagaaacccaagctcctcctcggaaccgctcacctagagccagaccaacgttactcagggctcctcccagcttgtaggagctgaggtttcacccttaacccaagggagcacaggtcccacctccagcccggggagcctaggaccactcagcccctaggagtatatttccgcacttcagaattccatatcttgcgaatccaagctccctgccccaaataacttcagtcctgcttccagaatttggaaatcctagtttcctctccttcgtatcccgagtctgggacacaaaactccgcccccagcctatgagcatcctgagccccgccctcttcctgacgaaactggccccggatcagagcaggacctcccttccgaccctctgggaacctcccagaggtccagcccatctcggagcatcccggaggaaatctgcagaggggttaggagtgggtgacaagagcctgatctcttcctgttttgtacatagatttatttttcagttccaagaaagatgaatacattttgttaaaaaaaaaaaaaaaa

SEQ ID NO: 2674 - DNA, 2091 bp, Homo sapiens
gagcggagccgcgggcgggagggcggacggaccgactgacggtagggacgggaggcgagcaagatggcgcagacgcagggcacccggaggaaagtctgttactactacgacggggatgttggaaattactattatggacaaggccacccaatgaagcctcaccgaatccgcatgactcataatttgctgctcaactatggtctctaccgaaaaatggaaatctatcgccctcacaaagccaatgctgaggagatgaccaagtaccacagcgatgactacattaaattcttgcgctccatccgtccagataacatgtcggagtacagcaagcagatgcagagattcaacgttggtgaggactgtccagtattcgatggcctgtttgagttctgtcagttgtctactggtggttctgtggcaagtgctgtgaaacttaataagcagcagacggacatcgctgtgaattgggctgggggcctgcaccatgcaaagaagtccgaggcatctggcttctgttacgtcaatgatatcgtcttggccatcctggaactgctaaagtatcaccagagggtgctgtacattgacattgatattcaccatggtgacggcgtggaagaggccttctacaccacggaccgggtcatgactgtgtcctttcataagtatggagagtacttcccaggaactggggacctacgggatatcggggctggcaaaggcaagtattatgctgttaactacccgctccgagacgggattgatgacgagtcctatgaggccattttcaagccggtcatgtccaaagtaatggagatgttccagcctagtgcggtggtcttacagtgtggctcagactccctatctggggatcggttaggttgcttcaatctaactatcaaaggacacgccaagtgtgtggaatttgtcaagagctttaacctgcctatgctgatgctgggaggcggtggttacaccattcgtaacgttgcccggtgctggacatatgagacagctgtggccctggatacggagatccctaatgagcttccatacaatgactactttgaatactttggaccagatttcaagctccacatcagtccttccaatatgactaaccagaacacgaatgagtacctggagaagatcaaacagcgactgtttgagaaccttagaatgctgccgcacgcacctggggtccaaatgcaggcgattcctgaggacgccatccctgaggagagtggcgatgaggacgaagacgaccctgacaagcgcatctcgatctgctcctctgacaaacgaattgcctgtgaggaagagttctccgattctgaagaggagggagaggggggccgcaagaactcttccaacttcaaaaaagccaagagagtcaaaacagaggatgaaaaagagaaagacccagaggagaagaaagaagtcaccgaagaggagaaaaccaaggaggagaagccagaagccaaaggggtcaaggaggaggtcaagttggcctgaatggacctctccagctctggcttcctgctgagtccctcacgtttcttccccaacccctcagattttatattttctatttctctgtgtatttatataaaaatttattaaatataaatatccccagggacagaaaccaaggccccgagctcagggcagctgtgctgggtgagctcttccaggagccaccttgccacccattcttcccgttcttaactttgaaccataaagggtgccaggtctgggtgaaagggatacttttatgcaaccataagacaaactcctgaaatgccaagtgcctgcttagtagctttggaaaggtgcccttattgaacattctagaaggggtggctgggtcttcaaggatctcctgtttttttcaggctcctaaagtaacatcagccatttttagattggttctgttttcgtaccttcccactggcctcaagtgagccaagaaacactgcctgccctctgtctgtcttctcctaattctgcaggtggaggttgctagtctagtttcctttttgagatactattttcatttttgtgagcctctttgtaataaaatggtacatttct

SEQ ID NO: 2675 - protein, 482 aa, Homo sapiens
MAQTQGTRRKVCYYYDGDVGNYYYGQGHPMKPHRIRMTHNLLLNYGLYRKMEIYRPHKANAEEMTKYHSDDYIKFLRSIRPDNMSEYSKQMQRFNVGEDCPVFDGLFEFCQLSTGGSVASAVKLNKQQTDIAVNWAGGLHHAKKSEASGFCYVNDIVLAILELLKYHQRVLYIDIDIHHGDGVEEAFYTTDRVMTVSFHKYGEYFPGTGDLRDIGAGKGKYYAVNYPLRDGIDDESYEAIFKPVMSKVMEMFQPSAVVLQCGSDSLSGDRLGCFNLTIKGHAKCVEFVKSFNLPMLMLGGGGYTIRNVARCWTYETAVALDTEIPNELPYNDYFEYFGPDFKLHISPSNMTNQNTNEYLEKIKQRLFENLRMLPHAPGVQMQAIPEDAIPEESGDEDEDDPDKRISICSSDKRIACEEEFSDSEEEGEGGRKNSSNFKKAKRVKTEDEKEKDPEEKKEVTEEEKTKEEKPEAKGVKEEVKLA

SEQ ID NO: 2676 - DNA, 2091 bp, Homo sapiens
gagcggagccgcgggcgggagggcggacggaccgactgacggtagggacgggaggcgagcaagatggcgcagacgcagggcacccggaggaaagtctgttactactacgacggggatgttggaaattactattatggacaaggccacccaatgaagcctcaccgaatccgcatgactcataatttgctgctcaactatggtctctaccgaaaaatggaaatctatcgccctcacaaagccaatgctgaggagatgaccaagtaccacagcgatgactacattaaattcttgcgctccatccgtccagataacatgtcggagtacagcaagcagatgcagagattcaacgttggtgaggactgtccagtattcgatggcctgtttgagttctgtcagttgtctactggtggttctgtggcaagtgctgtgaaacttaataagcagcagacggacatcgctgtgaattgggctgggggcctgcaccatgcaaagaagtccgaggcatctggcttctgttacgtcaatgatatcgtcttggccatcctggaactgctaaagtatcaccagagggtgctgtacattgacattgatattcaccatggtgacggcgtggaagaggccttctacaccacggaccgggtcatgactgtgtcctttcataagtatggagagtacttcccaggaactggggacctacgggatatcggggctggcaaaggcaagtattatgctgttaactacccgctccgagacgggattgatgacgagtcctatgaggccattttcaagccggtcatgtccaaagtaatggagatgttccagcctagtgcggtggtcttacagtgtggctcagactccctatctggggatcggttaggttgcttcaatctaactatcaaaggacacgccaagtgtgtggaatttgtcaagagctttaacctgcctatgctgatgctgggaggcggtggttacaccattcgtaacgttgcccggtgcaggacatatgagacagctgtggccctggatacggagatccctaatgagcttccatacaatgactactttgaatactttggaccagatttcaagctccacatcagtccttccaatatgactaaccagaacacgaatgagtacctggagaagatcaaacagcgactgtttgagaaccttagaatgctgccgcacgcacctggggtccaaatgcaggcgattcctgaggacgccatccctgaggagagtggcgatgaggacgaagacgaccctgacaagcgcatctcgatctgctcctctgacaaacgaattgcctgtgaggaagagttctccgattctgaagaggagggagaggggggccgcaagaactcttccaacttcaaaaaagccaagagagtcaaaacagaggatgaaaaagagaaagacccagaggagaagaaagaagtcaccgaagaggagaaaaccaaggaggagaagccagaagccaaaggggtcaaggaggaggtcaagttggcctgaatggacctctccagctctggcttcctgctgagtccctcacgtttcttccccaacccctcagattttatattttctatttctctgtgtatttatataaaaatttattaaatataaatatccccagggacagaaaccaaggccccgagctcagggcagctgtgctgggtgagctcttccaggagccaccttgccacccattcttcccgttcttaactttgaaccataaagggtgccaggtctgggtgaaagggatacttttatgcaaccataagacaaactcctgaaatgccaagtgcctgcttagtagctttggaaaggtgcccttattgaacattctagaaggggtggctgggtcttcaaggatctcctgtttttttcaggctcctaaagtaacatcagccatttttagattggttctgttttcgtaccttcccactggcctcaagtgagccaagaaacactgcctgccctctgtctgtcttctcctaattctgcaggtggaggttgctagtctagtttcctttttgagatactattttcatttttgtgagcctctttgtaataaaatggtacatttct

SEQ ID NO: 2677 - DNA, 4669 bp, Homo sapiens
ctctgaggggcttagaaattaacaggttgtttatataattggccttaaatgaggtgagagtgaagagactagagccatctctggaaaacatcattatcccattccccgggaagctaccctctggaactcaagatttgaccatatctgttttgaggattcattatgaacaaagaagtctccccaggtgtgaagtttttcaacatgagtggcctcggggacagttcatccgaccctgctaacccagactcacataagaggaaaggatcgccatgtgacacactggcatcaagcacggaaaagaggcgcagggagcaagaaaataaatatttagaagaactagctgagttactgtctgccaacattagtgacattgacagcttgagtgtaaaaccagacaaatgcaagattttgaagaaaacagtcgatcagatacagctaatgaagagaatggaacaagagaaatcaacaactgatgacgatgtacagaaatcagacatctcatcaagtagtcaaggagtgatagaaaaggaatccttgggacctcttcttttggaggctttggatggatttttctttgttgtgaactgtgaagggagaattgtatttgtgtcagagaatgtaaccagctacttaggttacaatcaggaggaattaatgaatacgagcgtctacagcatactgcacgtgggggatcatgcagaatttgtgaagaatctgctaccaaaatcactagtaaatggagttccttggcctcaagaggcaacacgacgaaatagccatacctttaactgcaggatgctaattcaccctccagatgagccagggaccgagaaccaagaagcttgccagcgttatgaagtaatgcagtgtttcactgtgtcacagccaaaatcaattcaagaggatggagaagatttccagtcatgtctgatttgtattgcacggcgattacctcggcctccagctattacgggtgtagaatcctttatgaccaagcaagatactacaggtaaaatcatctctattgatactagttccctgagagctgctggcagaactggttgggaagatttagtgaggaagtgcatttatgcttttttccaacctcagggcagagaaccatcttatgccagacagctgttccaagaagtgatgactcgtggcactgcctccagcccctcctatagattcatattgaatgatgggacaatgcttagcgcccacaccaagtgtaaactttgctaccctcaaagtccagacatgcaacctttcatcatgggaattcatatcatcgacagggagcacagtgggctttctcctcaagatgacactaattctggaatgtcaattccccgagtaaatccctcggtcaatcctagtatctctccagctcatggtgtggctcgttcatccacattgccaccatccaacagcaacatggtatccaccagaataaaccgccagcagagctcagaccttcatagcagcagtcatagtaattctagcaacagccaaggaagtttcggatgctcacccggaagtcagattgtagccaatgttgccttaaaccaaggacaggccagttcacagagcagtaatccctctttaaacctcaataattctcctatggaaggtacaggaatatccctagcacagttcatgtctccaaggagacaggttacttctggattggcaacaaggcccaggatgccaaacaattcctttcctcctaatatttcgacattaagctctcccgttggcatgacaagtagtgcctgtaataataataaccgatcttattcaaacatcccagtaacatctttacagggtatgaatgaaggacccaataactccgttggcttctctgccagttctccagtcctcaggcagatgagctcacagaattcacctagcagattaaatatacaaccagcaaaagctgagtccaaagataacaaagagattgcctcaattttaaatgaaatgattcaatctgacaacagctctagtgatggcaaacctctggattcagggcttctgcataacaatgacagactttcagatggagacagtaaatactctcaaaccagtcacaaactagtgcagcttttgacaacaactgccgaacagcagttacggcatgctgatatagacacaagctgcaaagatgtcctgtcttgcacaggcacttccaactctgcctctgctaactcttcaggaggttcttgtccctcttctcatagctcattgacagaacggcataaaattctacaccggctcttacaggagggtagcccctcagatatcaccactttgtctgtcgagcctgataaaaaggacagtgcatctacttctgtgtcagtgactggacaggtacaaggaaactccagtataaaactagaactggatgcttcaaagaaaaaagaatcaaaagaccatcagctcctacgctatcttttagataaagatgagaaagatttaagatcaactccaaacctgagcctggatgatgtaaaggtgaaagtggaaaagaaagaacagatggatccatgtaatacaaacccaaccccaatgaccaaacccactcctgaggaaataaaactggaggcccagagccagtttacagctgaccttgaccagtttgatcagttactgcccacgctggagaaggcagcacagttgccaggcttatgtgagacagacaggatggatggtgcggtcaccagtgtaaccatcaaatcggagatcctgccagcttcacttcagtccgccactgccagacccacttccaggctaaatagattacctgagctggaattggaagcaattgataaccaatttggacaaccaggaacaggcgatcagattccatggacaaataatacagtgacagctataaatcagagtaaatcagaagaccagtgtattagctcacaattagatgagcttctctgtccacccacaacagtagaagggagaaatgatgagaaggctcttcttgaacagctggtatccttccttagtggcaaagatgaaactgagctagctgaactagacagagctctgggaattgacaaacttgttcaggggggtggattagatgtattatcagagagatttccaccacaacaagcaacgccacctttgatcatggaagaaagacccaacctttattcccagccttactcttctccttctcctactgccaatctccctagccctttccaaggcatggtcaggcaaaaaccttcactggggacgatgcctgttcaagtaacacctccccgaggtgctttttcacctggcatgggcatgcagcccaggcaaactctaaacagacctccggctgcacctaaccagcttcgacttcaactacagcagcgattacagggacaacagcagttgatacaccaaaatcggcaagctatcttaaaccagtttgcagcaactgctcctgttggcatcaatatgagatcaggcatgcaacagcaaattacacctcagccacccctgaatgctcaaatgttggcacaacgtcagcgggaactgtacagtcaacagcaccgacagaggcagctaatacagcagcaaagagccatgcttatgaggcagcaaagctttgggaacaacctccctccctcatctggactaccagttcaaatggggaacccccgtcttcctcagggtgctccacagcaattcccctatccaccaaactatggtacaaatccaggaaccccacctgcttctaccagcccgttttcacaactagcagcaaatcctgaagcatccttggccaaccgcaacagcatggtgagcagaggcatgacaggaaacataggaggacagtttggcactggaatcaatcctcagatgcagcagaatgtcttccagtatccaggagcaggaatggttccccaaggtgaggccaactttgctccatctctaagccctgggagctccatggtgccgatgccaatccctcctcctcagagttctctgctccagcaaactccacctgcctccgggtatcagtcaccagacatgaaggcctggcagcaaggagcgataggaaacaacaatgtgttcagtcaagctgtccagaaccagcccacgcctgcacagccaggagtatacaacaacatgagcatcaccgtttccatggcaggtggaaatacgaatgttcagaacatgaacccaatgatggcccagatgcagatgagctctttgcagatgccaggaatgaacactgtgtgccctgagcagataaatgatcccgcactgagacacacaggcctctactgcaaccagctctcatccactgaccttctcaaaacagaagcagatggaacccagcaggtgcaacaggttcaggtgtttgctgacgtccagtgtacagtgaatctggtaggcggggacccttacctgaaccagcctggtccactgggaactcaaaagcccacgtcaggaccacagaccccccaggcccagcagaagagcctccttcagcagctactgactgaataaccacttttaaaggaatgtgaaatttaaataatagacatacagagatatacaaatatattatatatttttctgagatttttgatatctcaatctgcagccattcttcaggtcgtagcatttggagcaaaaaaaaaaaaaaaaa

SEQ ID NO: 2678 - protein, 1441 aa, Homo sapiens
MSGLGDSSSDPANPDSHKRKGSPCDTLASSTEKRRREQENKYLEELAELLSANISDIDSLSVKPDKCKILKKTVDQIQLMKRMEQEKSTTDDDVQKSDISSSSQGVIEKESLGPLLLEALDGFFFVVNCEGRIVFVSENVTSYLGYNQEELMNTSVYSILHVGDHAEFVKNLLPKSLVNGVPWPQEATRRNSHTFNCRMLIHPPDEPGTENQEACQRYEVMQCFTVSQPKSIQEDGEDFQSCLICIARRLPRPPAITGVESFMTKQDTTGKIISIDTSSLRAAGRTGWEDLVRKCIYAFFQPQGREPSYARQLFQEVMTRGTASSPSYRFILNDGTMLSAHTKCKLCYPQSPDMQPFIMGIHIIDREHSGLSPQDDTNSGMSIPRVNPSVNPSISPAHGVARSSTLPPSNSNMVSTRINRQQSSDLHSSSHSNSSNSQGSFGCSPGSQIVANVALNQGQASSQSSNPSLNLNNSPMEGTGISLAQFMSPRRQVTSGLATRPRMPNNSFPPNISTLSSPVGMTSSACNNNNRSYSNIPVTSLQGMNEGPNNSVGFSASSPVLRQMSSQNSPSRLNIQPAKAESKDNKEIASILNEMIQSDNSSSDGKPLDSGLLHNNDRLSDGDSKYSQTSHKLVQLLTTTAEQQLRHADIDTSCKDVLSCTGTSNSASANSSGGSCPSSHSSLTERHKILHRLLQEGSPSDITTLSVEPDKKDSASTSVSVTGQVQGNSSIKLELDASKKKESKDHQLLRYLLDKDEKDLRSTPNLSLDDVKVKVEKKEQMDPCNTNPTPMTKPTPEEIKLEAQSQFTADLDQFDQLLPTLEKAAQLPGLCETDRMDGAVTSVTIKSEILPASLQSATARPTSRLNRLPELELEAIDNQFGQPGTGDQIPWTNNTVTAINQSKSEDQCISSQLDELLCPPTTVEGRNDEKALLEQLVSFLSGKDETELAELDRALGIDKLVQGGGLDVLSERFPPQQATPPLIMEERPNLYSQPYSSPSPTANLPSPFQGMVRQKPSLGTMPVQVTPPRGAFSPGMGMQPRQTLNRPPAAPNQLRLQLQQRLQGQQQLIHQNRQAILNQFAATAPVGINMRSGMQQQITPQPPLNAQMLAQRQRELYSQQHRQRQLIQQQRAMLMRQQSFGNNLPPSSGLPVQMGNPRLPQGAPQQFPYPPNYGTNPGTPPASTSPFSQLAANPEASLANRNSMVSRGMTGNIGGQFGTGINPQMQQNVFQYPGAGMVPQGEANFAPSLSPGSSMVPMPIPPPQSSLLQQTPPASGYQSPDMKAWQQGAIGNNNVFSQAVQNQPTPAQPGVYNNMSITVSMAGGNTNVQNMNPMMAQMQMSSLQMPGMNTVCPEQINDPALRHTGLYCNQLSSTDLLKTEADGTQQVQQVQVFADVQCTVNLVGGDPYLNQPGPLGTQKPTSGPQTPQAQQKSLLQQLLTE

SEQ ID NO: 2679 - DNA, 4721 bp, Homo sapiens
ctctgaggggcttagaaattaacaggttgtttatataattggccttaaatgaggtgagagtgaagagactagagccatctctggaaaacatcattatcccattccccgggaagctaccctctggaactcaagatttgaccatatctgttttgaggattcattatgaacaaagaagtctccccaggtgtgaagtttttcaacatgagtggcctcggggacagttcatccgaccctgctaacccagactcacataagaggaaaggatcgccatgtgacacactggcatcaagcacggaaaagaggcgcagggagcaagaaaataaatatttagaagaactagctgagttactgtctgccaacattagtgacattgacagcttgagtgtaaaaccagacaaatgcaagattttgaagaaaacagtcgatcagatacagctaatgaagagaatggaacaagagaaatcaacaactgatgacgatgtacagaaatcagacatctcatcaagtagtcaaggagtgatagaaaaggaatccttgggacctcttcttttggaggctttggatggatttttctttgttgtgaactgtgaagggagaattgtatttgtgtcagagaatgtaaccagctacttaggttacaatcaggaggaattaatgaatacgagcgtctacagcatactgcacgtgggggatcatgcagaatttgtgaagaatctgctaccaaaatcactagtaaatggagttccttggcctcaagaggcaacacgacgaaatagccatacctttaactgcaggatgctaattcaccctccagatgagccagggaccgagaaccaagaagcttgccagcgttatgaagtaatgcagtgtttcactgtgtcacagccaaaatcaattcaagaggatggagaagatttccagtcatgtctgatttgtattgcacggcgattacctcggcctccagctattacgggtgtagaatcctttatgaccaagcaagatactacaggtaaaatcatctctattgatactagttccctgagagctgctggcagaactggttgggaagatttagtgaggaagtgcatttatgcttttttccaacctcagggcagagaaccatcttatgccagacagctgttccaagaagtgatgactcgtggcactgcctccagcccctcctatagattcatattgaatgatgggacaatgcttagcgcccacaccaagtgtaaactttgctaccctcaaagtccagacatgcaacctttcatcatgggaattcatatcatcgacagggagcacagtgggctttctcctcaagatgacactaattctggaatgtcaattccccgagtaaatccctcggtcaatcctagtatctctccagctcatggtgtggctcgttcatccacattgccaccatccaacagcaacatggtatccaccagaataaaccgccagcagagctcagaccttcatagcagcagtcatagtaattctagcaacagccaaggaagtttcggatgctcacccggaagtcagattgtagccaatgttgccttaaaccaaggacaggccagttcacagagcagtaatccctctttaaacctcaataattctcctatggaaggtacaggaatatccctagcacagttcatgtctccaaggagacaggttacttctggattggcaacaaggcccaggatgccaaacaattcctttcctcctaatatttcgacattaagctctcccgttggcatgacaagtagtgcctgtaataataataaccgatcttattcaaacatcccagtaacatctttacagggtatgaatgaaggacccaataactccgttggcttctctgccagttctccagtcctcaggcagatgagctcacagaattcacctagcagattaaatatacaaccagcaaaagctgagtccaaagataacaaagagattgcctcaattttaaatgaaatgattcaatctgacaacagctctagtgatggcaaacctctggattcagggcttctgcataacaatgacagactttcagatggagacagtaaatactctcaaaccagtcacaaactagtgcagcttttgacaacaactgccgaacagcagttacggcatgctgatatagacacaagctgcaaagatgtcctgtcttgcacaggcacttccaactctgcctctgctaactcttcaggaggttcttgtccctcttctcatagctcattgacagaacggcataaaattctacaccggctcttacaggagggtagcccctcagatatcaccactttgtctgtcgagcctgataaaaaggacagtgcatctacttctgtgtcagtgactggacaggtacaaggaaactccagtataaaactagaactggatgcttcaaagaaaaaagaatcaaaagaccatcagctcctacgctatcttttagataaagatgagaaagatttaagatcaactccaaacctgagcctggatgatgtaaaggtgaaagtggaaaagaaagaacagatggatccatgtaatacaaacccaaccccaatgaccaaacccactcctgaggaaataaaactggaggcccagagccagtttacagctgaccttgaccagtttgatcagttactgcccacgctggagaaggcagcacagttgccaggcttatgtgagacagacaggatggatggtgcggtcaccagtgtaaccatcaaatcggagatcctgccagcttcacttcagtccgccactgccagacccacttccaggctaaatagattacctgagctggaattggaagcaattgataaccaatttggacaaccaggaacaggcgatcagattccatggacaaataatacagtgacagctataaatcagagtaaatcagaagaccagtgtattagctcacaattagatgagcttctctgtccacccacaacagtagaagggagaaatgatgagaaggctcttcttgaacagctggtatccttccttagtggcaaagatgaaactgagctagctgaactagacagagctctgggaattgacaaacttgttcaggggggtggattagatgtattatcagagagatttccaccacaacaagcaacgccacctttgatcatggaagaaagacccaacctttattcccagccttactcttctccttctcctactgccaatctccctagccctttccaaggcatggtcaggcaaaaaccttcactggggacgatgcctgttcaagtaacacctccccgaggtgctttttcacctggcatgggcatgcagcccaggcaaactctaaacagacctccggctgcacctaaccagcttcgacttcaactacagcagcgattacagggacaacagcagttgatacaccaaaatcggcaagctatcttaaaccagtttgcagcaactgctcctgttggcatcaatatgagatcaggcatgcaacagcaaattacacctcagccacccctgaatgctcaaatgttggcacaacgtcagcgggaactgtacagtcaacagcaccgacagaggcagctaatacagcagcaaagagccatgcttatgaggcagcaaagctttgggaacaacctccctccctcatctggactaccagttcaaatggggaacccccgtcttcctcagggtgctccacagcaattcccctatccaccaaactatggtacaaatccaggaaccccacctgcttctaccagcccgttttcacaactagcagcaaatcctgaagcatccttggccaaccgcaacagcatggtgagcagaggcatgacaggaaacataggaggacagtttggcactggaatcaatcctcagatgcagcagaatgtcttccagtatccaggagcaggaatggttccccaaggtgaggccaactttgctccatctctaagccctgggagctccatggtgccgatgccaatccctcctcctcagagttctctgctccagcaaactccacctgcctccgggtatcagtcaccagacatgaaggcctggcagcaaggagcgataggaaacaacaatgtgttcagtcaagctgtccagaaccagcccacgcctgcacagccaggagtatacaacaacatgagcatcaccgtttccatggcaggtggaaatacgaatgttcagaacatgaacccaatgatggcccagatgcagatgagctctttgcagatgccaggaatgaacactgtgtgccctgagcagataaatgatcccgcactgagacacacaggcctctactgcaaccagctctcatccactgaccttctcaaaacagaagcagatggaacccaggacaagaagacagaagagttcttctctgtggtgactacagactagaggaatgctctacaggtgcaacaggttcaggtgtttgctgacgtccagtgtacagtgaatctggtaggcggggacccttacctgaaccagcctggtccactgggaactcaaaagcccacgtcaggaccacagaccccccaggcccagcagaagagcctccttcagcagctactgactgaataaccacttttaaaggaatgtgaaatttaaataatagacatacagagatatacaaatatattatatatttttctgagatttttgatatctcaatctgcagccattcttcaggtcgtagcatttggagcaaaaaaaaaaaa

SEQ ID NO: 2680 - protein, 1399 aa, Homo sapiens
MSGLGDSSSDPANPDSHKRKGSPCDTLASSTEKRRREQENKYLEELAELLSANISDIDSLSVKPDKCKILKKTVDQIQLMKRMEQEKSTTDDDVQKSDISSSSQGVIEKESLGPLLLEALDGFFFVVNCEGRIVFVSENVTSYLGYNQEELMNTSVYSILHVGDHAEFVKNLLPKSLVNGVPWPQEATRRNSHTFNCRMLIHPPDEPGTENQEACQRYEVMQCFTVSQPKSIQEDGEDFQSCLICIARRLPRPPAITGVESFMTKQDTTGKIISIDTSSLRAAGRTGWEDLVRKCIYAFFQPQGREPSYARQLFQEVMTRGTASSPSYRFILNDGTMLSAHTKCKLCYPQSPDMQPFIMGIHIIDREHSGLSPQDDTNSGMSIPRVNPSVNPSISPAHGVARSSTLPPSNSNMVSTRINRQQSSDLHSSSHSNSSNSQGSFGCSPGSQIVANVALNQGQASSQSSNPSLNLNNSPMEGTGISLAQFMSPRRQVTSGLATRPRMPNNSFPPNISTLSSPVGMTSSACNNNNRSYSNIPVTSLQGMNEGPNNSVGFSASSPVLRQMSSQNSPSRLNIQPAKAESKDNKEIASILNEMIQSDNSSSDGKPLDSGLLHNNDRLSDGDSKYSQTSHKLVQLLTTTAEQQLRHADIDTSCKDVLSCTGTSNSASANSSGGSCPSSHSSLTERHKILHRLLQEGSPSDITTLSVEPDKKDSASTSVSVTGQVQGNSSIKLELDASKKKESKDHQLLRYLLDKDEKDLRSTPNLSLDDVKVKVEKKEQMDPCNTNPTPMTKPTPEEIKLEAQSQFTADLDQFDQLLPTLEKAAQLPGLCETDRMDGAVTSVTIKSEILPASLQSATARPTSRLNRLPELELEAIDNQFGQPGTGDQIPWTNNTVTAINQSKSEDQCISSQLDELLCPPTTVEGRNDEKALLEQLVSFLSGKDETELAELDRALGIDKLVQGGGLDVLSERFPPQQATPPLIMEERPNLYSQPYSSPSPTANLPSPFQGMVRQKPSLGTMPVQVTPPRGAFSPGMGMQPRQTLNRPPAAPNQLRLQLQQRLQGQQQLIHQNRQAILNQFAATAPVGINMRSGMQQQITPQPPLNAQMLAQRQRELYSQQHRQRQLIQQQRAMLMRQQSFGNNLPPSSGLPVQMGNPRLPQGAPQQFPYPPNYGTNPGTPPASTSPFSQLAANPEASLANRNSMVSRGMTGNIGGQFGTGINPQMQQNVFQYPGAGMVPQGEANFAPSLSPGSSMVPMPIPPPQSSLLQQTPPASGYQSPDMKAWQQGAIGNNNVFSQAVQNQPTPAQPGVYNNMSITVSMAGGNTNVQNMNPMMAQMQMSSLQMPGMNTVCPEQINDPALRHTGLYCNQLSSTDLLKTEADGTQDKKTEEFFSVVTTD

SEQ ID NO: 2681 - DNA, 4660 bp, Homo sapiens
ggggcttagaaattaacaggttgtttatataattggccttaaatgaggtgagagtgaagagactagagccatctctggaaaacatcattatcccattccccgggaagctaccctctggaactcaagatttgaccatatctgttttgaggattcattatgaacaaagaagtctcccaggtgtgaagtttttcaacatgagtggcctcggggacagttcatccgaccctgctaacccagactcacataagaggaaaggatcgccatgtgacacactggcatcaagcacggaaaagaggcgcagggagcaagaaaataaatatttagaagaactagctgagttactgtctgccaacattagtgacattgacagcttgagtgtaaaaccagacaaatgcaagattttgaagaaaacagtcgatcagatacagctaatgaagagaatggaacaagagaaatcaacaactgatgacgatgtacagaaatcagacatctcatcaagtagtcaaggagtgatagaaaaggaatccttgggaccccttcttttggaggctttggatggatttttctttgttgtgaactgtgaagggagaattgtatttgtgtcagagaatgtaaccagctacttaggttacaatcaggaggaattaatgaataccagcgtctacagcatactgcacgtgggggatcatgcagaatttgtgaagaatctgctaccaaaatcactagtaaatggagttccttggcctcaagaggcaacacgacgaaatagccatacctttaactgcaggatgctaattcaccctccagatgagccagggaccgagaaccaagaagcttgccagcgttatgaagtaatgcagtgtttcactgtgtcacagccaaaatcaattcaagaggatggagaagatttccagtcatgtctgatttgtattgcacggcgattacctcggcctccagctattacgggtgtagaatcctttatgaccaagcaagatactacaggtaaaatcatctctattgatactagttccctgagagctgctggcagaactggttgggaagatttagtgaggaagtgcatttatgcttttttccaacctcagggcagagaaccatcttatgccagacagctgttccaagaagtgatgactcgtggcactgcctccagcccctcctatagattcatattgaatgatgggacaatgcttagcgcccacaccaagtgtaaactttgctaccctcaaagtccagacatgcaacctttcatcatgggaattcatatcatcgacagggagcacagtgggctttctcctcaagatgacactaattctggaatgtcaattccccgagtaaatccctcggtcaatcctagtatctctccagctcatggtgtggctcgttcatccacattgccaccatccaacagcaacatggtatccaccagaataaaccgccagcagagctcagaccttcatagcagcagtcatagtaattctagcaacagccaaggaagtttcggatgctcacccggaagtcagattgtagccaatgttgccttaaaccaaggacaggccagttcacagagcagtaatccctctttaaacctcaataattctcctatggaaggtacaggaatatccctagcacagttcatgtctccaaggagacaggttacttctggattggcaacaaggcccaggatgccaaacaattcctttcctcctaatatttcgacattaagctctcccgttggcatgacaagtagtgcctgtaataataataaccgatcttattcaaacatcccagtaacatctttacagggtatgaatgaaggacccaataactccgttggcttctctgccagttctccagtcctcaggcagatgagctcacagaattcacctagcagattaaatatacaaccagcaaaagctgagtccaaagataacaaagagattgcctcaattttaaatgaaatgattcaatctgacaacagctctagtgatggcaaacctctggattcagggcttctgcataacaatgacagactttcagatggagacagtaaatactctcaaaccagtcacaaactagtgcagcttttgacaacaactgccgaacagcagttacggcatgctgatatagacacaagctgcaaagatgtcctgtcttgcacaggcacttccaactctgcctctgctaactcttcaggaggttcttgtccctcttctcatagctcattgacagaacggcataaaattctacaccggctcttacaggagggtagcccctcagatatcaccactttgtctgtcgagcctgataaaaaggacagtgcatctacttctgtgtcagtgactggacaggtacaaggaaactccagtataaaactagaactggatgcttcaaagaaaaaagaatcaaaagaccatcagctcctacgctatcttttagataaagatgagaaagatttaagatcaactccaaacctgagcctggatgatgtaaaggtgaaagtggaaaagaaagaacagatggatccatgtaatacaaacccaaccccaatgaccaaacccactcctgaggaaataaaactggaggcccagagccagtttacagctgaccttgaccagtttgatcagttactgcccacgctggagaaggcagcacagttgccaggcttatgtgagacagacaggatggatggtgcggtcaccagtgtaaccatcaaatcggagatcctgccagcttcacttcagtccgccactgccagacccacttccaggctaaatagattacctgagctggaattggaagcaattgataaccaatttggacaaccaggaacaggcgatcagattccatggacaaataatacagtgacagctataaatcagagtaaatcagaagaccagtgtattagctcacaattagatgagcttctctgtccacccacaacagtagaagggagaaatgatgagaaggctcttcttgaacagctggtatccttccttagtggcaaagatgaaactgagctagctgaactagacagagctctgggaattgacaaacttgttcaggggggtggattagatgtattatcagagagatttccaccacaacaagcaacgccacctttgatcatggaagaaagacccaacctttattcccagccttactcttctccttctcctactgccaatctccctagccctttccaaggcatggtcaggcaaaaaccttcactggggacgatgcctgttcaagtaacacctccccgaggtgctttttcacctggcatgggcatgcagcccaggcaaactctaaacagacctccggctgcacctaaccagcttcgacttcaactacagcagcgattacagggacaacagcagttgatacaccaaaatcggcaagctatcttaaaccagtttgcagcaactgctcctgttggcatcaatatgagatcaggcatgcaacagcaaattacacctcagccacccctgaatgctcaaatgttggcacaacgtcagcgggaactgtacagtcaacagcaccgacagaggcagctaatacagcagcaaagagccatgcttatgaggcagcaaagctttgggaacaacctccctccctcatctggactaccagttcaaatggggaacccccgtcttcctcagggtgctccacagcaattcccctatccaccaaactatggtacaaatccaggaaccccacctgcttctaccagcccgttttcacaactagcagcaaatcctgaagcatccttggccaaccgcaacagcatggtgagcagaggcatgacaggaaacataggaggacagtttggcactggaatcaatcctcagatgcagcagaatgtcttccagtatccaggagcaggaatggttccccaaggtgaggccaactttgctccatctctaagccctgggagctccatggtgccgatgccaatccctcctcctcagagttctctgctccagcaaactccacctgcctccgggtatcagtcaccagacatgaaggcctggcagcaaggagcgataggaaacaacaatgtgttcagtcaagctgtccagaaccagcccacgcctgcacagccaggagtatacaacaacatgagcatcaccgtttccatggcaggtggaaatacgaatgttcagaacatgaacccaatgatggcccagatgcagatgagctctttgcagatgccaggaatgaacactgtgtgccctgagcagataaatgatcccgcactgagacacacaggcctctactgcaaccagctctcatccactgaccttctcaaaacagaagcagatggaacccaggtgcaacaggttcaggtgtttgctgacgtccagtgtacagtgaatctggtaggcggggacccttacctgaaccagcctggtccactgggaactcaaaagcccacgtcaggaccacagaccccccaggcccagcagaagagcctccttcagcagctactgactgaataaccacttttaaaggaatgtgaaatttaaataatagacatacagagatatacaaatatattatatatttttctgagatttttgatatctcaatctgcagccattcttcaggtcgtagcatttggagcaaaaaaaaaaaaaaaaaa

SEQ ID NO: 2682 - protein, 1440 aa, Homo sapiens
MSGLGDSSSDPANPDSHKRKGSPCDTLASSTEKRRREQENKYLEELAELLSANISDIDSLSVKPDKCKILKKTVDQIQLMKRMEQEKSTTDDDVQKSDISSSSQGVIEKESLGPLLLEALDGFFFVVNCEGRIVFVSENVTSYLGYNQEELMNTSVYSILHVGDHAEFVKNLLPKSLVNGVPWPQEATRRNSHTFNCRMLIHPPDEPGTENQEACQRYEVMQCFTVSQPKSIQEDGEDFQSCLICIARRLPRPPAITGVESFMTKQDTTGKIISIDTSSLRAAGRTGWEDLVRKCIYAFFQPQGREPSYARQLFQEVMTRGTASSPSYRFILNDGTMLSAHTKCKLCYPQSPDMQPFIMGIHIIDREHSGLSPQDDTNSGMSIPRVNPSVNPSISPAHGVARSSTLPPSNSNMVSTRINRQQSSDLHSSSHSNSSNSQGSFGCSPGSQIVANVALNQGQASSQSSNPSLNLNNSPMEGTGISLAQFMSPRRQVTSGLATRPRMPNNSFPPNISTLSSPVGMTSSACNNNNRSYSNIPVTSLQGMNEGPNNSVGFSASSPVLRQMSSQNSPSRLNIQPAKAESKDNKEIASILNEMIQSDNSSSDGKPLDSGLLHNNDRLSDGDSKYSQTSHKLVQLLTTTAEQQLRHADIDTSCKDVLSCTGTSNSASANSSGGSCPSSHSSLTERHKILHRLLQEGSPSDITTLSVEPDKKDSASTSVSVTGQVQGNSSIKLELDASKKKESKDHQLLRYLLDKDEKDLRSTPNLSLDDVKVKVEKKEQMDPCNTNPTPMTKPTPEEIKLEAQSQFTADLDQFDQLLPTLEKAAQLPGLCETDRMDGAVTSVTIKSEILPASLQSATARPTSRLNRLPELELEAIDNQFGQPGTGDQIPWTNNTVTAINQSKSEDQCISSQLDELLCPPTTVEGRNDEKALLEQLVSFLSGKDETELAELDRALGIDKLVQGGGLDVLSERFPPQQATPPLIMEERPNLYSQPYSSPSPTANLPSPFQGMVRQKPSLGTMPVQVTPPRGAFSPGMGMQPRQTLNRPPAAPNQLRLQLQQRLQGQQQLIHQNRQAILNQFAATAPVGINMRSGMQQQITPQPPLNAQMLAQRQRELYSQQHRQRQLIQQQRAMLMRQQSFGNNLPPSSGLPVQMGNPRLPQGAPQQFPYPPNYGTNPGTPPASTSPFSQLAANPEASLANRNSMVSRGMTGNIGGQFGTGINPQMQQNVFQYPGAGMVPQGEANFAPSLSPGSSMVPMPIPPPQSSLLQQTPPASGYQSPDMKAWQQGAIGNNNVFSQAVQNQPTPAQPGVYNNMSITVSMAGGNTNVQNMNPMMAQMQMSSLQMPGMNTVCPEQINDPALRHTGLYCNQLSSTDLLKTEADGTQVQQVQVFADVQCTVNLVGGDPYLNQPGPLGTQKPTSGPQTPQAQQKSLLQQLLTE

SEQ ID NO: 2683 - DNA, 2030 bp, Homo sapiens
gcgcgatggcggcggctcctttaggcagctgaaaggggatttaggcccggaagatccgagtccatccgcggcggggagagggcaagcgggaccggtaggggccggagcagcggcggcggcgctcggactgtcccatccgccccgtattgaggcgctgggagcggcggggcgacaggaaagcgatggtgaaagcggggccgtgaggggggcggagccgggagccggacccgcagtagcggcagcagcggcgccgcctcccagagttcagacccaggaagcggccgggagggcaggagcgaatcgggccgccgccgccatggagctgagagtcgggaacaggtaccggctgggccggaagatcggcagcggctccttcggagacatctatctcggtacggacattgctgcaggagaagaggttgccatcaagcttgaatgtgtcaaaaccaaacaccctcagctccacattgagagcaaaatctacaagatgatgcagggaggagtgggcatccccaccatcagatggtgcggggcagagggggactacaacgtcatggtgatggagctgctggggccaagcctggaggacctcttcaacttctgctccaggaaattcagcctcaaaaccgtcctgctgcttgctgaccaaatgatcagtcgcatcgaatacattcattcaaagaacttcatccaccgggatgtgaagccagacaacttcctcatgggcctggggaagaagggcaacctggtgtacatcatcgacttcgggctggccaagaagtaccgggatgcacgcacccaccagcacatcccctatcgtgagaacaagaacctcacggggacggcgcggtacgcctccatcaacacgcaccttggaattgaacaatcccgaagagatgacttggagtctctgggctacgtgctaatgtacttcaacctgggctctctcccctggcaggggctgaaggctgccaccaagagacagaaatacgaaaggattagcgagaagaaaatgtccacccccatcgaagtgttgtgtaaaggctacccttccgaatttgccacatacctgaatttctgccgttccttgcgttttgacgacaagcctgactactcgtacctgcggcagcttttccggaatctgttccatcgccagggcttctcctatgactacgtgttcgactggaacatgctcaaatttggtgccagccgggccgccgatgacgccgagcgggagcgcagggaccgagaggagcggctgagacactcgcggaacccggctacccgcggcctcccttccacagcctccggccgcctgcgggggacgcaggaagtggctccccccacacccctcacccctacctcacacacggctaacacctccccccggcccgtctccggcatggagagagagcggaaagtgagtatgcggctgcaccgcggggcccccgtcaacatctcctcgtccgacctcacaggccgacaagatacctctcgcatgtccacctcacagattcctggtcgggtggcttccagtggtcttcagtctgtcgtgcaccgatgagaactctccttattgctgtgaagggcagacaatgcatggctgatctactctgttaccaatggctttactagtgacacgtcccccggtctaggatcgaaatgttaacaccgggagctctccaggccactcacccagcgacgctcgtgggggaaacatactaaacggacagactccaagagctgccaccgctggggctgcactgcggccccccacgtgaactcggttgtaacggggctgggaagaaaagcagagagagaattgcagagaatcagactccttttccagggcctcagctccctccagtggtggccgccctgtactccctgacgattccactgtaactaccaatcttctacttggttaagacagttttgtatcattttgctaaaaattattggcttaaatctgtgtaaagaaaaaaaaaaaaaaaaaaaaaaaaaaaaaaaaaaaaaaaaaaaaaaaaaaa

SEQ ID NO: 2684 - protein, 415 aa, Homo sapiens
MELRVGNRYRLGRKIGSGSFGDIYLGTDIAAGEEVAIKLECVKTKHPQLHIESKIYKMMQGGVGIPTIRWCGAEGDYNVMVMELLGPSLEDLFNFCSRKFSLKTVLLLADQMISRIEYIHSKNFIHRDVKPDNFLMGLGKKGNLVYIIDFGLAKKYRDARTHQHIPYRENKNLTGTARYASINTHLGIEQSRRDDLESLGYVLMYFNLGSLPWQGLKAATKRQKYERISEKKMSTPIEVLCKGYPSEFATYLNFCRSLRFDDKPDYSYLRQLFRNLFHRQGFSYDYVFDWNMLKFGASRAADDAERERRDREERLRHSRNPATRGLPSTDSGRLRGTQEVAPPTPLTPTSHTANTSPRPVSGMERERKVSMRLHRGAPVNISSSDLTGRQDTSRMSTSQIPGRVASSGLQSVVHR

SEQ ID NO: 2685 - DNA, 1626 bp, Homo sapiens
ggcacgaggccgccacccgagccggagcgggctgggccgccaaggcaagatggtggactacagcgtgtgggaccacattgaggtgtctgatgatgaagacgagacgcaccccaacatcgacacggccagtctcttccgctggcggcatcaggcccgggtggaacgcatggagcagttccagaaggagaaggaggaactggacaggggctgccgcgagtgcaagcgcaaggtggccgagtgccagaggaaactgaaggagctggaggtggccgagggcggcaaggcagagctggagcgcctgcaggccgaggcacagcagctgcgcaaggaggagcggagctgggagcagaagctggaggagatgcgcaagaaggagaagagcatgccctggaacgtggacacgctcagcaaagacggcttcagcaagagcatggtaaataccaagcccgagaagacggaggaggactcagaggaggtgagggagcagaaacacaagaccttcgtggaaaaatacgagaaacagatcaagcactttggcatgcttcgccgctgggatgacagccaaaagtacctgtcagacaacgtccacctggtgtgcgaggagacagccaattacctggtcatttggtgcattgacctagaggtggaggagaaatgtgcactcatggagcaggtggcccaccagacaatcgtcatgcaatttatcctggagctggccaagagcctaaaggtggacccccgggcctgcttccggcagttcttcactaagattaagacagccgatcgccagtacatggagggcttcaacgacgagctggaagccttcaaggagcgtgtgcggggccgtgccaagctgcgcatcgagaaggccatgaaggagtacgaggaggaggagcgcaagaagcggctcggccccggcggcctggaccccgtcgaggtctacgagtccctccctgaggaactccagaagtgcttcgatgtgaaggacgtgcagatgctgcaggacgccatcagcaagatggaccccaccgacgcaaagtaccacatgcagcgctgcattgactctggcctctgggtccccaactctaaggccagcgaggccaaggagggagaggaggcaggtcctggggacccattactggaagctgttcccaagacgggcgatgagaaggatgtcagtgtgtgacctgccccagctaccaccgccacctgcttccaggcccctatgtgccccttttcagaaaacagatagatgccatctcgcccgctcctgacttcctctacttgcgctgctcggcccagcctggggggcccgcccagccctccctggcctctccactgtctccactctccagcgcccattcaagtctctgctttgagtcaaggggcttcactgcctgcagccccccatcagcattatgccaaaggcccgggggtccggggaagggcagaggtcaccaggctggtctaccaggtagttggggagggtccccagccaaggggccggctctcgtcactgggctctgttttcactgttcgtctgctgtctgtgtcttctatttggcaaacagcaatgatcttccaataaaagatttcagatgctcaaaaaaaaaaaaaaaaaaaaaa

SEQ ID NO: 2686 - protein, 378 aa, Homo sapiens
MVDYSVWDHIEVSDDEDETHPNIDTASLFRWRHQARVERMEQFQKEKEELDRGCRECKRKVAECQRKLKELEVAEGGKAELERLQAEAQQLRKEERSWEQKLEEMRKKEKSMPWNVDTLSKDGFSKSMVNTKPEKTEEDSEEVREQKHKTFVEKYEKQIKHFGMLRRWDDSQKYLSDNVHLVCEETANYLVIWCIDLEVEEKCALMEQVAHQTIVMQFILELAKSLKVDPRACFRQFFTKIKTADRQYMEGFNDELEAFKERVRGRAKLRIEKAMKEYEEEERKKRLGPGGLDPVEVYESLPEELQKCFDVKDVQMLQDAISKMDPTDAKYHMQRCIDSGLWVPNSKASEAKEGEEAGPGDPLLEAVPKTGDEKDVSV

SEQ ID NO: 2687 - DNA, 3121 bp, Homo sapiens
ggcacgagtggctgcttgcggctagtggatggtaattgcctgcctcgcgctagcagcaagctgctctgttaaaagcgaaaatgaaacaattgcctgcggcaacagttcgactcctttcaagttctcagatcatcacttcggtggtcagtgttgtaaaagagcttattgaaaactccttggatgctggtgccacaagcgtagatgttaaactggagaactatggatttgataaaattgaggtgcgagataacggggagggtatcaaggctgttgatgcacctgtaatggcaatgaagtactacacctcaaaaataaatagtcatgaagatcttgaaaatttgacaacttacggttttcgtggagaagccttggggtcaatttgttgtatagctgaggttttaattacaacaagaacggctgctgataattttagcacccagtatgttttagatggcagtggccacatactttctcagaaaccttcacatcttggtcaaggtacaactgtaactgctttaagattatttaagaatctacctgtaagaaagcagttttactcaactgcaaaaaaatgtaaagatgaaataaaaaagatccaagatctcctcatgagctttggtatccttaaacctgacttaaggattgtctttgtacataacaaggcagttatttggcagaaaagcagagtatcagatcacaagatggctctcatgtcagttctggggactgctgttatgaacaatatggaatcctttcagtaccactctgaagaatctcagatttatctcagtggatttcttccaaagtgtgatgcagaccactctttcactagtctttcaacaccagaaagaagtttcatcttcataaacagtcgaccagtacatcaaaaagatatcttaaagttaatccgacatcattacaatctgaaatgcctaaaggaatctactcgtttgtatcctgttttctttctgaaaatcgatgttcctacagctgatgttgatgtaaatttaacaccagataaaagccaagtattattacaaaataaggaatctgttttaattgctcttgaaaatctgatgacgacttgttatggaccattacctagtacaaattcttatgaaaataataaaacagatgtttccgcagctgacatcgttcttagtaaaacagcagaaacagatgtgctttttaataaagtggaatcatctggaaagaattattcaaatgttgatacttcagtcattccattccaaaatgatatgcataatgatgaatctggaaaaaacactgatgattgtttaaatcaccagataagtattggtgactttggttatggtcattgtagtagtgaaatttctaacattgataaaaacactaagaatgcatttcaggacatttcaatgagtaatgtatcatgggagaactctcagacggaatatagtaaaacttgttttataagttccgttaagcacacccagtcagaaaatggcaataaagaccatatagatgagagtggggaaaatgaggaagaagcaggtcttgaaaactcttcggaaatttctgcagatgagtggagcaggggaaatatacttaaaaattcagtgggagagaatattgaacctgtgaaaattttagtgcctgaaaaaagtttaccatgtaaagtaagtaataataattatccaatccctgaacaaatgaatcttaatgaagattcatgtaacaaaaaatcaaatgtaatagataataaatctggaaaagttacagcttatgatttacttagcaatcgagtaatcaagaaacccatgtcagcaagtgctctttttgttcaagatcatcgtcctcagtttctcatagaaaatcctaagactagtttagaggatgcaacactacaaattgaagaactgtggaagacattgagtgaagaggaaaaactgaaatatgaagagaaggctactaaagacttggaacgatacaatagtcaaatgaagagagccattgaacaggagtcacaaatgtcactaaaagatggcagaaaaaagataaaacccaccagcgcatggaatttggcccagaagcacaagttaaaaacctcattatctaatcaaccaaaacttgatgaactccttcagtcccaaattgaaaaaagaaggagtcaaaatattaaaatggtacagatccccttttctatgaaaaacttaaaaataaattttaagaaacaaaacaaagttgacttagaagagaaggatgaaccttgcttgatccacaatctcaggtttcctgatgcatggctaatgacatccaaaacagaggtaatgttattaaatccatatagagtagaagaagccctgctatttaaaagacttcttgagaatcataaacttcctgcagagccactggaaaagccaattatgttaacagagagtctttttaatggatctcattatttagacgttttatataaaatgacagcagatgaccaaagatacagtggatcaacttacctgtctgatcctcgtcttacagcgaatggtttcaagataaaattgataccaggagtttcaattactgaaaattacttggaaatagaaggaatggctaattgtctcccattctatggagtagcagatttaaaagaaattcttaatgctatattaaacagaaatgcaaaggaagtttatgaatgtagacctcgcaaagtgataagttatttagagggagaagcagtgcgtctatccagacaattacccatgtacttatcaaaagaggacatccaagacattatctacagaatgaagcaccagtttggaaatgaaattaaagagtgtgttcatggtcgcccattttttcatcatttaacctatcttccagaaactacatgagagtgtgttcatggtcgcccattttttcatcatttaacctatcttccagaaactacatgattaaatatgtttaagaagattagttaccattgaaattggttctgtcataaaacagcatgagtctggttttaaattatctttgtattatgtgtcacatggttattttttaaatgaggattcactgacttgtttttatattgaaaaaagttccacgtattgtagaaaacgtaaataaactaata

SEQ ID NO: 2688 - protein, 932 aa, Homo sapiens
MKQLPAATVRLLSSSQIITSVVSVVKELIENSLDAGATSVDVKLENYGFDKIEVRDNGEGIKAVDAPVMAMKYYTSKINSHEDLENLTTYGFRGEALGSICCIAEVLITTRTAADNFSTQYVLDGSGHILSQKPSHLGQGTTVTALRLFKNLPVRKQFYSTAKKCKDEIKKIQDLLMSFGILKPDLRIVFVHNKAVIWQKSRVSDHKMALMSVLGTAVMNNMESFQYHSEESQIYLSGFLPKCDADHSFTSLSTPERSFIFINSRPVHQKDILKLIRHHYNLKCLKESTRLYPVFFLKIDVPTADVDVNLTPDKSQVLLQNKESVLIALENLMTTCYGPLPSTNSYENNKTDVSAADIVLSKTAETDVLFNKVESSGKNYSNVDTSVIPFQNDMHNDESGKNTDDCLNHQISIGDFGYGHCSSEISNIDKNTKNAFQDISMSNVSWENSQTEYSKTCFISSVKHTQSENGNKDHIDESGENEEEAGLENSSEISADEWSRGNILKNSVGENIEPVKILVPEKSLPCKVSNNNYPIPEQMNLNEDSCNKKSNVIDNKSGKVTAYDLLSNRVIKKPMSASALFVQDHRPQFLIENPKTSLEDATLQIEELWKTLSEEEKLKYEEKATKDLERYNSQMKRAIEQESQMSLKDGRKKIKPTSAWNLAQKHKLKTSLSNQPKLDELLQSQIEKRRSQNIKMVQIPFSMKNLKINFKKQNKVDLEEKDEPCLIHNLRFPDAWLMTSKTEVMLLNPYRVEEALLFKRLLENHKLPAEPLEKPIMLTESLFNGSHYLDVLYKMTADDQRYSGSTYLSDPRLTANGFKIKLIPGVSITENYLEIEGMANCLPFYGVADLKEILNAILNRNAKEVYECRPRKVISYLEGEAVRLSRQLPMYLSKEDIQDIIYRMKHQFGNEIKECVHGRPFFHHLTYLPETT

SEQ ID NO: 2689 - DNA, 2771 bp, Homo sapiens
cgaggcggatcgggtgttgcatccatggagcgagctgagagctcgagtacagaacctgctaaggccatcaaacctattgatcggaagtcagtccatcagatttgctctgggcaggtggtactgagtctaagcactgcggtaaaggagttagtagaaaacagtctggatgctggtgccactaatattgatctaaagcttaaggactatggagtggatcttattgaagtttcagacaatggatgtggggtagaagaagaaaacttcgaaggcttaactctgaaacatcacacatctaagattcaagagtttgccgacctaactcaggttgaaacttttggctttcggggggaagctctgagctcactttgtgcactgagcgatgtcaccatttctacctgccacgcatcggcgaaggttggaactcgactgatgtttgatcacaatgggaaaattatccagaaaaccccctacccccgccccagagggaccacagtcagcgtgcagcagttattttccacactacctgtgcgccataaggaatttcaaaggaatattaagaaggagtatgccaaaatggtccaggtcttacatgcatactgtatcatttcagcaggcatccgtgtaagttgcaccaatcagcttggacaaggaaaacgacagcctgtggtatgcacaggtggaagccccagcataaaggaaaatatcggctctgtgtttgggcagaagcagttgcaaagcctcattccttttgttcagctgccccctagtgactccgtgtgtgaagagtacggtttgagctgttcggatgctctgcataatcttttttacatctcaggtttcatttcacaatgcacgcatggagttggaaggagttcaacagacagacagtttttctttatcaaccggcggccttgtgacccagcaaaggtctgcagactcgtgaatgaggtctaccacatgtataatcgacaccagtatccatttgttgttcttaacatttctgttgattcagaatgcgttgatatcaatgttactccagataaaaggcaaattttgctacaagaggaaaagcttttgttggcagttttaaagacctctttgataggaatgtttgatagtgatgtcaacaagctaaatgtcagtcagcagccactgctggatgttgaaggtaacttaataaaaatgcatgcagcggatttggaaaagcccatggtagaaaagcaggatcaatccccttcattaaggactggagaagaaaaaaaagacgtgtccatttccagactgcgagaggccttttctcttcgtcacacaacagagaacaagcctcacagcccaaagactccagaaccaagaaggagccctctaggacagaaaaggggtatgctgtcttctagcacttcaggtgccatctctgacaaaggcgtcctgagacctcagaaagaggcagtgagttccagtcacggacccagtgaccctacggacagagcggaggtggagaaggactcggggcacggcagcacttccgtggattctgaggggttcagcatcccagacacgggcagtcactgcagcagcgagtatgcggccagctccccaggggacaggggctcgcaggaacatgtggactctcaggagaaagcgcctgaaactgacgactctttttcagatgtggactgccattcaaaccaggaagataccggatgtaaatttcgagttttgcctcagccaactaatctcgcaaccccaaacacaaagcgttttaaaaaagaagaaattctttccagttctgacatttgtcaaaagttagtaaatactcaggacatgtcagcctctcaggttgatgtagctgtgaaaattaataagaaagttgtgcccctggacttttctatgagttctttagctaaacgaataaagcagttacatcatgaagcacagcaaagtgaaggggaacagaattacaggaagtttagggcaaagatttgtcctggagaaaatcaagcagccgaagatgaactaagaaaagagataagtaaaacgatgtttgcagaaatggaaatcattggtcagtttaacctgggatttataataaccaaactgaatgaggatatcttcatagtggaccagcatgccacggacgagaagtataacttcgagatgctgcagcagcacaccgtgctccaggggcagaggctcatagcacctcagactctcaacttaactgctgttaatgaagctgttctgatagaaaatctggaaatatttagaaagaatggctttgattttgttatcgatgaaaatgctccagtcactgaaagggctaaactgatttccttgccaactagtaaaaactggaccttcggaccccaggacgtcgatgaactgatcttcatgctgagcgacagccctggggtcatgtgccggccttcccgagtcaagcagatgtttgcctccagagcctgccggaagtcggtgatgattgggactgctcttaacacaagcgagatgaagaaactgatcacccacatgggggagatggaccacccctggaactgtccccatggaaggccaaccatgagacacatcgccaacctgggtgtcatttctcagaactgaccgtagtcactgtatggaataattggttttatcgcagatttttatgttttgaaagacagagtcttcactaaccttttttgttttaaaatgaaacctgctacttaaaaaaaatacacatcacacccatttaaaagtgatcttgagaaccttttcaaacc

SEQ ID NO: 2690 - protein, 862 aa, Homo sapiens
MERAESSSTEPAKAIKPIDRKSVHQICSGQVVLSLSTAVKELVENSLDAGATNIDLKLKDYGVDLIEVSDNGCGVEEENFEGLTLKHHTSKIQEFADLTQVETFGFRGEALSSLCALSDVTISTCHASAKVGTRLMFDHNGKIIQKTPYPRPRGTTVSVQQLFSTLPVRHKEFQRNIKKEYAKMVQVLHAYCIISAGIRVSCTNQLGQGKRQPVVCTGGSPSIKENIGSVFGQKQLQSLIPFVQLPPSDSVCEEYGLSCSDALHNLFYISGFISQCTHGVGRSSTDRQFFFINRRPCDPAKVCRLVNEVYHMYNRHQYPFVVLNISVDSECVDINVTPDKRQILLQEEKLLLAVLKTSLIGMFDSDVNKLNVSQQPLLDVEGNLIKMHAADLEKPMVEKQDQSPSLRTGEEKKDVSISRLREAFSLRHTTENKPHSPKTPEPRRSPLGQKRGMLSSSTSGAISDKGVLRPQKEAVSSSHGPSDPTDRAEVEKDSGHGSTSVDSEGFSIPDTGSHCSSEYAASSPGDRGSQEHVDSQEKAPETDDSFSDVDCHSNQEDTGCKFRVLPQPTNLATPNTKRFKKEEILSSSDICQKLVNTQDMSASQVDVAVKINKKVVPLDFSMSSLAKRIKQLHHEAQQSEGEQNYRKFRAKICPGENQAAEDELRKEISKTMFAEMEIIGQFNLGFIITKLNEDIFIVDQHATDEKYNFEMLQQHTVLQGQRLIAPQTLNLTAVNEAVLIENLEIFRKNGFDFVIDENAPVTERAKLISLPTSKNWTFGPQDVDELIFMLSDSPGVMCRPSRVKQMFASRACRKSVMIGTALNTSEMKKLITHMGEMDHPWNCPHGRPTMRHIANLGVISQN

SEQ ID NO: 2691 - DNA, 1389 bp, Homo sapiens
cgcggacttctgccaagcaccggctcatgtgaggctcgcggcacagcgttctctgggctccccagaagccagcctttcgctcccggacccggcagcccgagcaggagccgtgggaccgggcgccagcaccctctgcggcgtgtcatgggcccgcgccgccggagccgaaagcccgaggccccgaggaggcgcagcccgagcccgaccccgacccccggcccctcccggcggggcccctccttaggcgcttcctcccatcaacacagtcggcggagacaaggttggctaaaggagatccgaaagcttcagaagagcacacacctcttgataaggaagctgcccttcagccgcctggcaagagaaatatgtgttaaattcactcgtggtgtggacttcaattggcaagcccaggccctattggccctacaagaggcagcagaagcatttctagttcatctctttgaggacgcctatctcctcaccttacatgcaggccgagttactctcttcccaaaggatgtgcaactggcccggaggatccggggccttgaggagggactcggctgagctcctgcacccagtgtttctgtcagtctttcctgctcagccaggggggatgataccggggactctccagagccatgactagatccaatggattctgcgatgctgtctggactttgctgtctctgaacagtatgtgtgtgttgctttaaatatttttcttttttttgagaaggagaagactgcatgactttcctctgtaacagaggtaatatatgagacaatcaacaccgttccaaaggcctgaaaataattttcagataaagagactccaaggttgactttagtttgtgagttactcatgtgactatttgaggattttgaaaacatcagatttgctgtggtatgggagaaaaggttatgtacttattattttagctctttctgtaatatttacattttttaccatatgtacatttgtacttttattttacacataagggaaaaaataagaccactttgagcagttgcctggaaggctgggcatttccatcatatagacctctgcccttcagagtagcctcaccattagtggcagcatcatgtaactgagtggactgtgcttgtcaacggatgtgtagcttttcagaaacttaattggggatgaatagaaaacctgtaagctttgatgttctggttacttctagtaaattcctgtcaaaatcaattcagaaattctaacttggagaatttaacattttactcttgtaaatcatagaagatgtatcataacagttcagaattttaaagtacattttcgatgcttttatgggtatttttgtagtttctttgtagagagataataaaaatcaaaatatttaatga

SEQ ID NO: 2692 - protein, 140 aa, Homo sapiens
MGPRRRSRKPEAPRRRSPSPTPTPGPSRRGPSLGASSHQHSRRRQGWLKEIRKLQKSTHLLIRKLPFSRLAREICVKFTRGVDFNWQAQALLALQEAAEAFLVHLFEDAYLLTLHAGRVTLFPKDVQLARRIRGLEEGLG

SEQ ID NO: 2693 - DNA, 2473 bp, Homo sapiens
aatcgcgaaacccggcgagcggcgcgctggctatcgagcgagcggggcggaaccgggagttgcgccgccgctcgggcgccgggctccgtcgcggccgcagccccgcgggtcgccctcccgtgcctcgcccgcggacaccctggccgtggacaccctggccgtgggcacccgcggggcgcggcgcgggcgctgcgcggcggcggcggcggcatgaaggtcacgtcgctcgacgggcgccagctgcgcaagatgctccgcaaggaggcggcggcgcgctgcgtggtgctcgactgccggccctatctggccttcgctgcctcgaacgtgcgcggctcgctcaacgtcaacctcaactcggtggtgctgcggcgggcccggggcggcgcggtgtcggcgcgctacgtgctgcccgacgaggcggcgcgcgcgcggctcctgcaggagggcggcggcggcgtcgcggccgtggtggtgctggaccagggcagccgccactggcagaagctgcgagaggagagcgccgcgcgtgtcgtcctcacctcgctactcgcttgcctacccgccggcccgcgggtctacttcctcaaagggggatatgagactttctactcggaatatcctgagtgttgcgtggatgtaaaacccatttcacaagagaagattgagagtgagagagccctcatcagccagtgtggaaaaccagtggtaaatgtcagctacaggccagcttatgaccagggtggcccagttgaaatccttcccttcctctaccttggaagtgcctaccatgcatccaagtgcgagttcctcgccaacttgcacatcacagccctgctgaatgtctcccgacggacctccgaggcctgcatgacccacctacactacaaatggatccctgtggaagacagccacacggctgacattagctcccactttcaagaagcaatagacttcattgactgtgtcagggaaaagggaggcaaggtcctggtccactgtgaggctgggatctcccgttcacccaccatctgcatggcttaccttatgaagaccaagcagttccgcctgaaggaggccttcgattacatcaagcagaggaggagcatggtctcgcccaactttggcttcatgggccagctcctgcagtacgaatctgagatcctgccctccacgcccaacccccagcctccctcctgccaaggggaggcagcaggctcttcactgataggccatttgcagacactgagccctgacatgcagggtgcctactgcacattccctgcctcggtgctggcaccggtgcctacccactcaacagtctcagagctcagcagaagccctgtggcaacggccacatcctgctaaaactgggatggaggaatcggcccagccccaagagcaactgtgatttttgtttttaagactcatggacatttcatacctgtgcaatactgaagacctcattctgtcatgctgccccagtgagatagtgagtggtcaccaggcttgcaaatgaacttcagacggacctcagggtaggttctcgggactgaaggaaggccaagccattacgggagcacagcatgtgctgactactgtacttccagacccctgccctcttgggactgcccagtccttgcacctcagagttcgccttttcatttcaagcataagccaataaatacctgcagcaacgtgggagaaagaagttgctggaccaggagaaaaggcagttatgaagccaattcattttgaaggaagcacaatttccaccttattttttgaactttggcagtttcaatgtctgtctctgttgcttcggggcataagctgatcaccgtctagttgggaaagtcaccctacagggtttgtagggacatgatcagcatcctgatttgaaccctgaaatgttgtgtagacaccctcttgggtccaatgaggtagttggttgaagtagcaagatgttggcttttctggattttttttgccatgggttcttcactgaccttggactttggcatgattcttagtcatacttgaacttgtctcattccacctcttctcagagcaactcttcctttgggaaaagagttcttcagatcatagaccaaaaaagtcataccttcgaggtggtagcagtagattccaggaggagaagggtacttgctaggtatcctgggtcagtggcggtgcaaactggtttcctcagctgcctgtccttctgtgtgcttatgtctcttgtgacaattgttttcctccctgcccctggaggttgtcttcaactgtggacttctgggatttgcagattttgcaacgtggtactacttttttttctttttgtctgttagttatttctccaggggaaaaggcaataattttctaagacccgtgtgaatgtgaagaaaagcagtatgttactggttgttgttgttgttcttgttttttatatgtaaaataaaaatagtgaaaggag

SEQ ID NO: 2694 - protein, 384 aa, Homo sapiens
MKVTSLDGRQLRKMLRKEAAARCVVLDCRPYLAFAASNVRGSLNVNLNSVVLRRARGGAVSARYVLPDEAARARLLQEGGGGVAAVVVLDQGSRHWQKLREESAARVVLTSLLACLPAGPRVYFLKGGYETFYSEYPECCVDVKPISQEKIESERALISQCGKPVVNVSYRPAYDQGGPVEILPFLYLGSAYHASKCEFLANLHITALLNVSRRTSEACMTHLHYKWIPVEDSHTADISSHFQEAIDFIDCVREKGGKVLVHCEAGISRSPTICMAYLMKTKQFRLKEAFDYIKQRRSMVSPNFGFMGQLLQYESEILPSTPNPQPPSCQGEAAGSSLIGHLQTLSPDMQGAYCTFPASVLAPVPTHSTVSELSRSPVATATSC

SEQ ID NO: 2695 - DNA, 2139 bp, Homo sapiens
ggcacgagggtgagacgctgatgggaggatggacgtactggtgtctgagtgctccgcgcggctgctgcagcaggaagaagagattaaatctctgactgctgaaattgaccggttgaaaaactgtggctgtttaggagcttctccaaatttggagcagttacaagaagaaaatttaaaattaaagtatcgactgaatattcttcgaaagagtcttcaggcagaaaggaacaaaccaactaaaaatatgattaacattattagccgcctacaagaggtctttggtcatgcaattaaggctgcatatccagatttggaaaatcctcctctgctagtgacaccaagtcagcaggccaagtttggggactatcagtgtaatagtgctatgggtatttctcagatgctcaaaaccaaggaacagaaagttaatccaagagaaattgctgaaaacattaccaaacacctcccagacaatgaatgtattgaaaaagttgaaattgctggtcctggttttattaatgtccacttaagaaaggattttgtatcagaacaattgaccagtcttctagtgaatggagttcaactacctgctctgggagagaataaaaaggttatagttgacttttcctcccctaatatagctaaagagatgcatgtaggccacctgaggtcaactatcataggagagagtataagccgcctctttgaatttgcagggtatgacgtgctcaggttaaatcatgtaggagactgggggacccagtttggcatgctcatcgctcacctgcaagacaaatttccagattatctaacagtttcacctcctattggggatcttcaggtcttttataaggaatctaagaagaggtttgatactgaggaggaatttaagaagcgagcatatcagtgtgtagttctgctccagggtaaaaacccagatattacaaaagcttggaagcttatctgtgatgtctcccgccaagagttaaataaaatctatgatgcattggacgtctctttaatagagagaggggaatccttctatcaagataggatgaatgatattgtaaaggaatttgaagatagaggatttgtgcaggtggatgatggcagaaagattgtatttgtcccagggtgttccataccattaaccatagtaaaatcagatggaggttatacctatgatacatctgacctggctgctattaaacaaagactatttgaggaaaaagcagatatgattatctatgttgtggacaatggacaatctgtgcacttccagacaatatttgctgctgctcaaatgattggttggtatgaccctaaagtaactcgagtcttccatgctggatttggtgtggtgctaggggaagacaagaaaaagtttaaaacacgttcgggtgaaacagtgcgcctcatggatcttctgggagaaggactaaaacgatccatggacaagttgaaggaaaaagaaagagacaaggtcttaactgcagaggaattgaatgctgctcagacatccgttgcatatggctgcatcaaatatgctgacctttcccataaccggttgaatgactacatcttctcctttgacaaaatgctagatgacagaggaaatacagctgcttacttgttgtatgccttcactagaatcaggtctattgcacgtctggccaatattgatgaagaaatgctccaaaaagctgctcgagaaaccaagattcttttggatcatgagaaggaatggaaactaggccggtgcattttacggttccctgagattctgcaaaagattttagatgacttatttctccacactctctgtgattatatatatgagctggcaactgctttcacagagttctatgatagctgctactgtgtggagaaagatagacagactggaaaaatattgaaggtgaacatgtggcgtatgctgctatgtgaagcagtagctgctgtcatggccaaggggtttgatatcctgggaataaaacctgtccaaaggatgtaatccttcataggtttgaacactgtgtgtttttaccaaagtggccattggcactgtttgcttttttacaatcatgtggacacaagcataagtaaagaaaatttgtcaaccaaaaaaaaaaaaaaaaaaaa

SEQ ID NO: 2696 - protein, 660 aa, Homo sapiens
MDVLVSECSARLLQQEEEIKSLTAEIDRLKNCGCLGASPNLEQLQEENLKLKYRLNILRKSLQAERNKPTKNMINIISRLQEVFGHAIKAAYPDLENPPLLVTPSQQAKFGDYQCNSAMGISQMLKTKEQKVNPREIAENITKHLPDNECIEKVEIAGPGFINVHLRKDFVSEQLTSLLVNGVQLPALGENKKVIVDFSSPNIAKEMHVGHLRSTIIGESISRLFEFAGYDVLRLNHVGDWGTQFGMLIAHLQDKFPDYLTVSPPIGDLQVFYKESKKRFDTEEEFKKRAYQCVVLLQGKNPDITKAWKLICDVSRQELNKIYDALDVSLIERGESFYQDRMNDIVKEFEDRGFVQVDDGRKIVFVPGCSIPLTIVKSDGGYTYDTSDLAAIKQRLFEEKADMIIYVVDNGQSVHFQTIFAAAQMIGWYDPKVTRVFHAGFGVVLGEDKKKFKTRSGETVRLMDLLGEGLKRSMDKLKEKERDKVLTAEELNAAQTSVAYGCIKYADLSHNRLNDYIFSFDKMLDDRGNTAAYLLYAFTRIRSIARLANIDEEMLQKAARETKILLDHEKEWKLGRCILRFPEILQKILDDLFLHTLCDYIYELATAFTEFYDSCYCVEKDRQTGKILKVNMWRMLLCEAVAAVMAKGFDILGIKPVQRM

SEQ ID NO: 2697 - DNA, 2898 bp, Homo sapiens
cctctttcgaaccctgtaggattttacttcttgacgcatctgtttatttaaaccaaaggggtatgttgaggcatgggcaccctggcagcagaccccaaaccaaccctcttgacttgtgcctgccttcaggatatgttccttcctgaattgtctaagaaggctgagttgggggggtggttgctgatttttataacatatagcagttgttcataggcctgtgttttaaagaagggcaagcctgaactaccgtcctgcctaggcctggctccatacctgggagtagacagtcttctactttctaaaaactgacttaaatttgataaatctcctgttgagtgacagtgtttcgcagctgagcccttaaggagattctcagttgggcagagacatcccttcctcagacgccttgtgggctggactcctttggcccagttcaaagtgaggggagggctccaacaggccgggaagacagttgacttcaccctccttgggtttgtctgtctgtccgtctctgggaatggtcgcttcctgttttcccttttccttttaagcctcgccttgttccctcttctctctcttcatgaactactccgagtcttggtctccgtccctctatctctggctcctgcatctgtcctcggcttctggccttcctctccccctcccctcccctccctcgcgctgtcattcaccccgctcctctccgcgcacagccaatggagagacccagtcgaaacgcgaagctctcttgcaccgggctttttcgcctggtgattgatgtcccagagtcaacagcgagcgagcagccggagcggggaagcagaagccagagaggggaagaatacggcgccccctctctccctcccctcccccttctactttagcctttctgcgcacttcgcttccaagtctccgcgcagccaggagccgctgttgcctcccagcccctgctagctgccccccgagccgagcgcagcgagcgccgccgcccgggccccccggtggggccagggccagcatggagcacctgggtccgcaccacctccacccgggtcacgcagagcccattagcttcggcatcgaccagatcctcaacagcccggaccagggtggctgcatgggacccgcctcgcgcctccaggacggagaatacggccttggctgcttggtcggaggcgcctacacttacggcggcgggggctccgcggccgcgacgggggctggaggagcgggggcctatggtactggaggtcccggcggccccggaggcccggcaggcggcggcggcgcctgcagcatgggtcctctgaccggctcctacaacgtgaacatggccttggcaggcggccccggtcctggcggcggcggcggcagcagcggcggtgccggggcactcagcgctgcgggggtaatccgggtgccggcacacaggccgctcgccggagctgtggcccacccccagcccctggccaccggcttgcccaccgtgccctctgtgcctgccatgccgggcgtcaacaacctcactggcctcaccttcccctggatggagagtaaccgcagatacacaaaggacaggttcacaggtcacccctatcagaaccggacgccccccaagaagaagaagccgcgcacgtccttcacacgcctgcagatctgcgagctggagaagcgcttccaccgccagaagtacctggcctcggccgagcgcgccgccctggccaaggcgctcaaaatgaccgatgcgcaggtcaaaacctggttccagaaccggcggacaaagtggagacggcagactgcggaggaacgggaggccgagaggcagcaagcgaaccgcatcctcctgcagttgcagcaggaggccttccagaagagcctggcacagccgctgcccgctgaccctctgtgcgtgcacaactcgtcgctcttcgccctgcagaatctgcagccgtggtctgacgactcgaccaaaatcactagcgtcacgtcggtggcgtcggcctgcgagtgagcctgcccattctgccctgtgggaccccaggcccactcaggggtcactgaggcctgagacccaggactcctccccaccctcctggcctcagactgcacccaggaggggaacactgccctcgcacgccccaaagggcccccacatttgtgccgacactgttctccttcggtggaagagctcaagggacaaggacacgcgcccccctcccagaggcgtcccgcacctgtctgaactgttaagaaatctgtttttgtttatttcattttattttaatttttaacgtgggattcagagaaaggcaagggaggtaagggaggaggagcttctggggtccccagggctgtcatctgaatttgccctgggaaaccccttctctgtgacccacttctcatcacacacacatggaaacccataggtccacacacaggtggtgttactgtccctcctggtgtcaccccagagccacacatgggcatctatgggagagtgtcaaccagacagagggtcacagtgtttacactttggaccttacgatcaggcacaggtcaggggtgacacagactcatcctgaacagcatggcactgggtccagcacaaacacaaggtcatggccacactgtgacacactacaccacacacaacagccaacagctacaacagcctcacttggtctgccaggcccccaccacacatcccagcccaatccaggtacgcacagacaggttttcacataaatgcagcccatttctccagaacccatttgaggggtgggggggtgttaatttatgcacttataaggtgttttctgtgtaaccattttataaagtgcttgtgtaatttatgtgaaaaaaataaataaaagcctcaaaagcctccggaaaaaaaaa

SEQ ID NO: 2698 - protein, 330 aa, Homo sapiens
MEHLGPHHLHPGHAEPISFGIDQILNSPDQGGCMGPASRLQDGEYGLGCLVGGAYTYGGGGSAAATGAGGAGAYGTGGPGGPGGPAGGGGACSMGPLTGSYNVNMALAGGPGPGGGGGSSGGAGALSAAGVIRVPAHRPLAGAVAHPQPLATGLPTVPSVPAMPGVNNLTGLTFPWMESNRRYTKDRFTGHPYQNRTPPKKKKPRTSFTRLQICELEKRFHRQKYLASAERAALAKALKMTDAQVKTWFQNRRTKWRRQTAEEREAERQQANRILLQLQQEAFQKSLAQPLPADPLCVHNSSLFALQNLQPWSDDSTKITSVTSVASACE

SEQ ID NO: 2699 - DNA, 2993 bp, Homo sapiens
ggcacgaggggaaattcaaacgtgtttgcggaaaggagtttgggttccatcttttcatttccccagcgcagctttctgtagaaatggaatccgaggatttaagtggcagagaattgacaattgattccataatgaacaaagtgagagacattaaaaataagtttaaaaatgaagaccttactgatgaactaagcttgaataaaatttctgctgatactacagataactcgggaactgttaaccaaattatgatgatggcaaacaacccagaggactggttgagtttgttgctcaaactagagaaaaacagtgttccgctaagtgatgctcttttaaataaattgattggtcgttacagtcaagcaattgaagcgcttcccccagataaatatggccaaaatgagagttttgctagaattcaagtgagatttgctgaattaaaagctattcaagagccagatgatgcacgtgactactttcaaatggccagagcaaactgcaagaaatttgcttttgttcatatatcttttgcacaatttgaactgtcacaaggtaatgtcaaaaaaagtaaacaacttcttcaaaaagctgtagaacgtggagcagtaccactagaaatgctggaaattgccctgcggaatttaaacctccaaaaaaagcagctgctttcagaggaggaaaagaagaatttatcagcatctacggtattaactgcccaagaatcattttccggttcacttgggcatttacagaataggaacaacagttgtgattccagaggacagactactaaagccaggtttttatatggagagaacatgccaccacaagatgcagaaataggttaccggaattcattgagacaaactaacaaaactaaacagtcatgcccatttggaagagtcccagttaaccttctaaatagcccagattgtgatgtgaagacagatgattcagttgtaccttgttttatgaaaagacaaacctctagatcagaatgccgagatttggttgtgcctggatctaaaccaagtggaaatgattcctgtgaattaagaaatttaaagtctgttcaaaatagtcatttcaaggaacctctggtgtcagatgaaaagagttctgaacttattattactgattcaataaccctgaagaataaaacggaatcaagtcttctagctaaattagaagaaactaaagagtatcaagaaccagaggttccagagagtaaccagaaacagtggcaatctaagagaaagtcagagtgtattaaccagaatcctgctgcatcttcaaatcactggcagattccggagttagcccgaaaagttaatacagagcagaaacataccacttttgagcaacctgtcttttcagtttcaaaacagtcaccaccaatatcaacatctaaatggtttgacccaaaatctatttgtaagacaccaagcagcaataccttggatgattacatgagctgttttagaactccagttgtaaagaatgactttccacctgcttgtcagttgtcaacaccttatggccaacctgcctgtttccagcagcaacagcatcaaatacttgccactccacttcaaaatttacaggttttagcatcttcttcagcaaatgaatgcatttcggttaaaggaagaatttattccattttaaagcagataggaagtggaggttcaagcaaggtatttcaggtgttaaatgaaaagaaacagatatatgctataaaatatgtgaacttagaagaagcagataaccaaactcttgatagttaccggaacgaaatagcttatttgaataaactacaacaacacagtgataagatcatccgactttatgattatgaaatcacggaccagtacatctacatggtaatggagtgtggaaatattgatcttaatagttggcttaaaaagaaaaaatccattgatccatgggaacgcaagagttactggaaaaatatgttagaggcagttcacacaatccatcaacatggcattgttcacagtgatcttaaaccagctaactttctgatagttgatggaatgctaaagctaattgattttgggattgcaaaccaaatgcaaccagatacaacaagtgttgttaaagattctcaggttggcacagttaattatatgccaccagaagcaatcaaagatatgtcttcctccagagagaatgggaaatctaagtcaaagataagccccaaaagtgatgtttggtccttaggatgtattttgtactatatgacttacgggaaaacaccatttcagcagataattaatcagatttctaaattacatgccataattgatcctaatcatgaaattgaatttcccgatattccagagaaagatcttcaagatgtgttaaagtgttgtttaaaaagggacccaaaacagaggatatccattcctgagctcctggctcatccctatgttcaaattcaaactcatccagttaaccaaatggccaagggaaccactgaagaaatgaaatatgttctgggccaacttgttggtctgaattctcctaactccattttgaaagctgctaaaactttatatgaacactatagtggtggtgaaagtcataattcttcatcctccaagacttttgaaaaaaaaaggggaaaaaaatgatttgcagttattcgtaatgtcaaataccacctataaaatatattggactgttatactcttgaatccctgtggaaatctacatttgaagacaacatcactctgaagtgttatcagcaaaaaaaattcagtagattatctttaaaagaaaactgtaaaaatagcaaccacttatggtactgtatatattgtagacttgttttctctgttttatgctcttgtgtaatctacttgacatcattttactcttggaatagtgggtggatagcaagtatattctaaaaaactttgtaaataaagttttgtggctaaaatgacactaaaaaaaaaaaaaaaaaa

SEQ ID NO: 2700 - protein, 857 aa, Homo sapiens
MESEDLSGRELTIDSIMNKVRDIKNKFKNEDLTDELSLNKISADTTDNSGTVNQIMMMANNPEDWLSLLLKLEKNSVPLSDALLNKLIGRYSQAIEALPPDKYGQNESFARIQVRFAELKAIQEPDDARDYFQMARANCKKFAFVHISFAQFELSQGNVKKSKQLLQKAVERGAVPLEMLEIALRNLNLQKKQLLSEEEKKNLSASTVLTAQESFSGSLGHLQNRNNSCDSRGQTTKARFLYGENMPPQDAEIGYRNSLRQTNKTKQSCPFGRVPVNLLNSPDCDVKTDDSVVPCFMKRQTSRSECRDLVVPGSKPSGNDSCELRNLKSVQNSHFKEPLVSDEKSSELIITDSITLKNKTESSLLAKLEETKEYQEPEVPESNQKQWQSKRKSECINQNPAASSNHWQIPELARKVNTEQKHTTFEQPVFSVSKQSPPISTSKWFDPKSICKTPSSNTLDDYMSCFRTPVVKNDFPPACQLSTPYGQPACFQQQQHQILATPLQNLQVLASSSANECISVKGRIYSILKQIGSGGSSKVFQVLNEKKQIYAIKYVNLEEADNQTLDSYRNEIAYLNKLQQHSDKIIRLYDYEITDQYIYMVMECGNIDLNSWLKKKKSIDPWERKSYWKNMLEAVHTIHQHGIVHSDLKPANFLIVDGMLKLIDFGIANQMQPDTTSVVKDSQVGTVNYMPPEAIKDMSSSRENGKSKSKISPKSDVWSLGCILYYMTYGKTPFQQIINQISKLHAIIDPNHEIEFPDIPEKDLQDVLKCCLKRDPKQRISIPELLAHPYVQIQTHPVNQMAKGTTEEMKYVLGQLVGLNSPNSILKAAKTLYEHYSGGESHNSSSSKTFEKKRGKK

SEQ ID NO: 2701 - DNA, 1885 bp, Homo sapiens
tcccagggtcccgggttgggggggtggagcagcatttcgtcgccgcgggggtgccgggactccggccgcagtgtcgccgccatcacggacttcctgtgggacaagcgcacgggcctcgccgccagaacgatgccgcatcctcgaaggtaccactcctcagagcgaggcagccgggggagttaccgtgaacactatcggagccgaaagcataagcgacgaagaagtcgctcctggtcaagtagtagtgaccggacacgacggcgtcggcgagaggacagctaccatgtccgttctcgaagcagttatgatgatcgttcgtccgaccggagggtgtatgaccggcgatactgtggcagctacagacgcaacgattatagccgggatcggggagatgcctactatgacacagactatcggcattcctatgaatatcagcgggagaacagcagttaccgcagccagcgcagcagccggaggaagcacagacggcggaggaggcgcagccggacatttagccgctcatcttcgatgaaatcgttagcaccttaggagaggggaccttcggccgagttgtacaatgtgttgaccatcgcaggggtggggctcgagttgccctgaagatcattaagaatgtggagaagtacaaggaagcagctcgacttgagatcaacgtgctagagaaaatcaatgagaaagaccctgacaacaagaacctctgtgtccagatgtttgactggtttgactaccatggccacatgtgtatctcctttgagcttctgggccttagcaccttcgatttcctcaaagacaacaactacctgccctaccccatccaccaagtgcgccacatggccttccagctgtgccaggctgtcaagttcctccatgataacaagctgacacatacagacctcaagcctgaaaatattctgtttgtgaattcagactatgagctcacctacaacctagagaagaagcgagatgagcgcagtgtgaagagcacagctgtgcgggtggtagactttggcagtgccacctttgaccatgagcaccatagcaccattgtctccactcgccattaccgagcaccagaagtcatccttgagttgggctggtcacagccttgtgatgtgtggagtataggctgcatcatctttgaatactatgtgggattcaccctcttccagacccatgacaacagagagcatctagccatgatggaaaggatcttgggtcctatcccttcccggatgatccgaaagacaagaaagcagaaatatttttaccggggtcgcctggattgggatgagaacacatcagctgggcgctatgttcgtgagaactgcaaaccgctgcggcggtatctgacctcagaggcagaggaacaccaccagctcttcgatctgattgaaagcatgctagagtatgaaccagctaagcggctgaccttgggtgaagcccttcagcatcctttcttcgcccgccttcgggctgagccgcccaacaagttgtgggactccagtcgggatatcagtcggtgacgatcaggccctgggcccccctgcatcttttatagcagtgggtgtccagtccaggacactggtgcttttttatacaagagaacgagccagagttcactccttcctcctggctctctatatacctgtgaatatgtgaaatagtgtaaatatgaaagaacttgtacctatcacttcaacccctgccttgtacataatactattccatccacacagtttccaccctcacctgccccctcatacggagttggatgggggccgagtgaggtaaccaggtggcatctaccccatgttttataaggaattttgtacagtctttgtgaaataaaataacgtgcttcatttga

SEQ ID NO: 2702 - protein, 139 aa, Homo sapiens
MPHPRRYHSSERGSRGSYREHYRSRKHKRRRSRSWSSSSDRTRRRRREDSYHVRSRSSYDDRSSDRRVYDRRYCGSYRRNDYSRDRGDAYYDTDYRHSYEYQRENSSYRSQRSSRRKHRRRRRRSRTFSRSSSMKSLAP

SEQ ID NO: 2703 - DNA, 1973 bp, Homo sapiens
tcccagggtcccgggttgggggggtggagcagcatttcgtcgccgcgggggtgccgggactccggccgcagtgtcgccgccatcacggacttcctgtgggacaagcgcacgggcctcgccgccagaacgatgccgcatcctcgaaggtaccactcctcagagcgaggcagccgggggagttaccgtgaacactatcggagccgaaagcataagcgacgaagaagtcgctcctggtcaagtagtagtgaccggacacgacggcgtcggcgagaggacagctaccatgtccgttctcgaagcagttatgatgatcgttcgtccgaccggagggtgtatgaccggcgatactgtggcagctacagacgcaacgattatagccgggatcggggagatgcctactatgacacagactatcggcattcctatgaatatcagcgggagaacagcagttaccgcagccagcgcagcagccggaggaagcacagacggcggaggaggcgcagccggacatttagccgctcatcttcgcagcacagcagccggagagccaagagtgtagaggacgacgctgagggccacctcatctaccacgtcggggactggctacaagagcgatatgaaatcgttagcaccttaggagaggggaccttcggccgagttgtacaatgtgttgaccatcgcaggggtggggctcgagttgccctgaagatcattaagaatgtggagaagtacaaggaagcagctcgacttgagatcaacgtgctagagaaaatcaatgagaaagaccctgacaacaagaacctctgtgtccagatgtttgactggtttgactaccatggccacatgtgtatctcctttgagcttctgggccttagcaccttcgatttcctcaaagacaacaactacctgccctaccccatccaccaagtgcgccacatggccttccagctgtgccaggctgtcaagttcctccatgataacaagctgacacatacagacctcaagcctgaaaatattctgtttgtgaattcagactatgagctcacctacaacctagagaagaagcgagatgagcgcagtgtgaagagcacagctgtgcgggtggtagactttggcagtgccacctttgaccatgagcaccatagcaccattgtctccactcgccattaccgagcaccagaagtcatccttgagttgggctggtcacagccttgtgatgtgtggagtataggctgcatcatctttgaatactatgtgggattcaccctcttccagacccatgacaacagagagcatctagccatgatggaaaggatcttgggtcctatcccttcccggatgatccgaaagacaagaaagcagaaatatttttaccggggtcgcctggattgggatgagaacacatcagctgggcgctatgttcgtgagaactgcaaaccgctgcggcggtatctgacctcagaggcagaggaacaccaccagctcttcgatctgattgaaagcatgctagagtatgaaccagctaagcggctgaccttgggtgaagcccttcagcatcctttcttcgcccgccttcgggctgagccgcccaacaagttgtgggactccagtcgggatatcagtcggtgacgatcaggccctgggcccccctgcatcttttatagcagtgggtgtccagtccaggacactggtgcttttttatacaagagaacgagccagagttcactccttcctcctggctctctatatacctgtgaatatgtgaaatagtgtaaatatgaaagaacttgtacctatcacttcaacccctgccttgtacataatactattccatccacacagtttccaccctcacctgccccctcatacggagttggatgggggccgagtgaggtaaccaggtggcatctaccccatgttttataaggaattttgtacagtctttgtgaaataaaataacgtgcttcatttga

SEQ ID NO: 2704 - protein, 499 aa, Homo sapiens
MPHPRRYHSSERGSRGSYREHYRSRKHKRRRSRSWSSSSDRTRRRRREDSYHVRSRSSYDDRSSDRRVYDRRYCGSYRRNDYSRDRGDAYYDTDYRHSYEYQRENSSYRSQRSSRRKHRRRRRRSRTFSRSSSQHSSRRAKSVEDDAEGHLIYHVGDWLQERYEIVSTLGEGTFGRVVQCVDHRRGGARVALKIIKNVEKYKEAARLEINVLEKINEKDPDNKNLCVQMFDWFDYHGHMCISFELLGLSTFDFLKDNNYLPYPIHQVRHMAFQLCQAVKFLHDNKLTHTDLKPENILFVNSDYELTYNLEKKRDERSVKSTAVRVVDFGSATFDHEHHSTIVSTRHYRAPEVILELGWSQPCDVWSIGCIIFEYYVGFTLFQTHDNREHLAMMERILGPIPSRMIRKTRKQKYFYRGRLDWDENTSAGRYVRENCKPLRRYLTSEAEEHHQLFDLIESMLEYEPAKRLTLGEALQHPFFARLRAEPPNKLWDSSRDISR

SEQ ID NO: 2705 - DNA, 127 bp, Homo sapiens
gaggcagtgaccttcaaggatgtggctgtgatcttcactgaggaggagctggggctgctggaccctgcccagaggaagctgtaccgagatgtgatgcttgagaacttcaggaacctgctctcagtgg

SEQ ID NO: 2706 - DNA, 1398 bp, Homo sapiens
tcgaagactgagcggttgtggccgcgttgccgacctccagcagcagtcggcattctctaacgcagaaacccgggagtaggagactcagaatcgaatctcttctccctccccttcttgtgagatttttttgatcttcagctacattttcggctttgtgagaaaccttaccatcaaacacgatggccagcaacgttaccaacaagacagatcctcgctccatgaactcccgtgtattcattgggaatctcaacactcttgtggtcaagaaatctgatgtggaggcaatcttttcgaagtatggcaaaattgtgggctgctctgttcataagggctttgccttcgttcagtatgttaatgagagaaatgcccgggctgctgtagcaggagaggatggcagaatgattgctggccaggttttagatattaacctggctgcagagccaaaagtgaaccgaggaaaagcaggtgtgaaacgatctgcagcggagatgtacgggtcagtaacagaacacccttctccgtcccctctactcagctcctcttttgacttggactatgactttcaacgggactattatgataggatgtacagttacccagcacgtgtacctcctcctcctcctattgctcgggctgtagtgccctcgaaacgtcagcgtgtatcaggaaacacttcacgaaggggcaaaagtggcttcaattctaagagtggacagcggggatcttccaagtctggaaagttgaaaggagatgaccttcaggccattaagaaggagctgacccagataaaacaaaaagtggattctctcctggaaaacctggaaaaaatggaaaaggaacagagcaaacaagcagtagagatgaagaatgataagtcagaagaggagcagagcagcagctccgtgaagaaagatgagactaatgtgaagatggagtctgaggggggtgcagatgactctgctgaggagggggacctactggatgatgatgataatgaagatcggggggatgaccagctggagttgatcaaggatgatgaaaaagaggctgaggaaggagaggatgacagagacagcgccaatggaggatgactcttaagcacatagtggggtttagaaatcttatcccattatttctttacctaggcgcttgtctaagatcaaatttttcaccagatcctctcccctagtatcttcagcacatgctcactgttctccccatccttgtccttcccatgttcattaattcatattgccccgcgcctagtcccattttcacttcctttgacgctcctagtagttttgttaagtcttaccctgtaatttttgcttttaattttgatacctctttatgacttaacaataaaaaggatgtatggtttttaaaaaaaaaaaaaaa

SEQ ID NO: 2707 - DNA, 768 bp, Homo sapiens
agcatcccaaggcccgactccccgcaccactcagggtcctgtggacagctcacctagcggcaatggctgcaggctcccggacgtccctgctcctggcttttgccctgctctgcctgccctggcttcaagaggctggtgccgtccaaaccgttcccttatccaggctttttaaagaggctatgctccaagcccatcgcgcacaccagctggccattgacacctaccaggagtttataagctcttggggaatggactctattccgacatcctccaacatggaggaaacgcagcagaaatccaacttagagctgctccacatctccctgctgctcatcgagtcgcggctggagcccgtgcggttcctcaggagtaccttcaccaacaacctggtgtatgacacctcggacagcgatgactatcacctcctaaaggacctagaggaaggcatccaaatgctgatggggaggctggaagacggcagccacctgactgggcagaccctcaagcagacctacagcaagtttgacacaaactcgcacaaccatgacgcactgctcaagaactacgggctgctccactgcttcaggaaggacatggacaaggtcgagacattcctgcgcatggtgcagtgccgctctgtggagggcagctgtggcttctaggggcccgcgtggcatcctgtgacccctccccagtgcctctcctggccctgaaggtgccactccagtgcccaccagccttgtcttaataaaattaagttgtattgtt

SEQ ID NO: 2708 - DNA, 6972 bp, Homo sapiens
cgcccccgcctctgagctcccttcccatggcggccctagtgttggaggacgggtcggtcctgcggggccagccctttggggccgccgtgtcgactgccggggaagtggtgtttcaaaccggcatggtcggctaccccgaggccctcactgatccctcctacaaggcacagatcttagtgctcacctatcctctgatcggcaactatggcatccccccagatgaaatggatgagttcggtctctgcaagtggtttgaatcctcgggcatccacgtagcagcactggtagtgggagagtgctgtcctactcccagccactggagtgccacccgcaccctgcatgagtggctgcagcagcatggcatccctggcttgcaaggagtagacactcgggagctgaccaagaagttgcgggaacaggggtctctgctggggaagctggtccagaatggaacagaaccttcatccctgccattcttggaccccaatgcccgccccctggtaccagaggtctccattaagactccacgggtattcaatacagggggtgcccctcggatccttgctttggactgtggcctcaagtataatcagatccgatgcctctgccagcgtggggctgaggtcactgtggtaccctgggaccatgcactagacagccaagagtatgagggtctcttcttaagtaatgggcctggtgaccctgcctcctatcccagtgtcgtatccacactgagccgtgttttatctgagcctaatccccgacctgtctttgggatctgcctgggacaccagctattggccttagccattggggccaagacttacaagatgagatatgggaaccgaggccataaccagccctgcttgttggtgggctctgggcgctgctttctgacatcccagaaccatgggtttgctgtggagacagactcactgccagcagactgggctcctctcttcaccaacgccaatgatggttccaatgaaggcattgtgcacaacagcttgcctttcttcagtgtccagtttcacccagagcaccaagctggcccttcagatatggaactgcttttcgatatctttctggaaactgtgaaagaggccacagctgggaaccctgggggccagacagttagagagcggctgactgagcgcctctgtccccctgggattcccactcccggctctggacttccaccaccacgaaaggttctgatcctgggctcagggggcctctccattggccaagctggagaatttgactactcgggctctcaggcaattaaggccctgaaggaggaaaacatccagacgttgctgatcaaccccaatattgccacagtgcagacctcccaggggctggccgacaaggtctattttcttcccataacacctcattatgtaacccaggtgatacgtaatgaacgccccgatggtgtgttactgacttttgggggccagactgctctgaactgtggtgtggagctgaccaaggccggggtgctggctcggtatggggtccgggtcctgggcacaccagtggagaccattgagctgaccgaggatcgacgggcctttgctgccagaatggcagagatcggagagcatgtggccccgagcgaggcagcaaattctcttgaacaggcccaggcagccgctgaacggctggggtaccctgtgctagtgcgtgcagcctttgccctgggtggcctgggctctggctttgcctctaacagggaggagctctctgctctcgtggccccagcttttgcccataccagccaagtgctagtagacaagtctctgaagggatggaaggagattgagtacgaggtggtgagagacgcctatggcaactgtgtcacggtgtgtaacatggagaacttggacccactgggcatccacactggtgagtccatagtggtggcccctagccagacactgaatgacagggagtatcagctcctgaggcagacagctatcaaggtgacccagcacctgggaattgttggggagtgcaatgtgcagtatgccttgaaccctgagtctgagcagtattacatcattgaagtgaatgccaggctctctcgcagctctgccctggccagtaaggccacaggttatccactggcttatgtggcagccaagctagcattgggcatccctttgcctgagctcaggaactctgtgacagggggtacagcagcctttgaacccagcgtggattattgtgtggtgaagattcctcgatgggaccttagcaagttcctgcgagtcagcacaaagattgggagctgcatgaagagcgttggtgaagtcatgggcattgggcgttcatttgaggaggccttccagaaggccctgcgcatggtggatgagaactgtgtgggctttgatcacacagtgaaaccagtcagcgatatggagttggagactccaacagataagcggatttttgtggtggcagctgctttgtgggctggttattcagtggaccgcctgtatgagctcacacgcatcgaccgctggttcctgcaccgaatgaagcgtatcatcgcacatgcccagctgctagaacaacaccgtggacagcctttgccgccagacctgctgcaacaggccaagtgtcttggcttctcagacaaacagattgcccttgcagttctgagcacagagctggctgttcgcaagctgcgtcaggaactggggatctgtccagcagtgaaacagattgacacagttgcagctgagtggccagcccagacaaattacctatacctaacgtattggggcaccacccatgacctcacctttcgaacacctcatgtcctagtccttggctctggcgtctaccgtattggctctagcgttgaatttgactggtgtgctgtaggctgcatccagcagctccgaaagatgggatataagaccatcatggtgaactataacccagagacagtcagcaccgactatgacatgtgtgatcgactctactttgatgagatctcttttgaggtggtgatggacatctatgagctcgagaaccctgaaggtgtgatcctatccatgggtggacagctgcccaacaacatggccatggcgttgcatcggcagcagtgccgggtgctgggcacctcccctgaagccattgactcggctgagaaccgtttcaagttttcccggctccttgacaccattggtatcagccagcctcagtggagggagctcagtgacctcgagtctgctcgccaattctgccagaccgtggggtacccctgtgtggtgcgcccctcctatgtgctgagcggtgctgctatgaatgtggcctacacggatggagacctggagcgcttcctgagcagcgcagcagccgtctccaaagagcatcccgtggtcatctccaagttcatccaggaggctaaggagattgacgtggatgccgtggcctctgatggtgtggtggcagccatcgccatctctgagcatgtggagaatgcaggtgtgcattcaggtgatgcgacgctggtgacccccccacaagatatcactgccaaaaccctggagcggatcaaagccattgtgcatgctgtgggccaggagctacaggtcacaggacccttcaatctgcagctcattgccaaggatgaccagctgaaagttattgaatgcaacgtacgtgtctctcgctccttccccttcgtttccaagacactgggtgtggacctagtagccttggccacgcgggtcatcatgggggaagaagtggaacctgtggggctaatgactggttctggagtcgtgggagtaaaggtgcctcagttctccttctcccgcttggcgggtgctgacgtggtgttgggtgtggaaatgaccagtactggggaggtggccggctttggggagagccgctgtgaggcatacctcaaggccatgctaagcactggctttaagatccccaagaagaatatcctgctgaccattggcagctataagaacaaaagcgagctgctcccaactgtgcggctactggagagcctgggctacagcctctatgccagtctcggcacagctgacttctacactgagcatggcgtcaaggtaacagctgtggactggcactttgaggaggctgtggatggtgagtgcccaccacagcggagcatcctggagcagctagctgagaaaaactttgagctggtgattaacctgtcaatgcgtggagctgggggccggcgtctctcttcctttgtcaccaagggctaccgcacccgacgcttggccgctgacttctccgtgcccctaatcatcgatatcaagtgcaccaaactctttgtggaggccctaggccagatcgggccagcccctcctttgaaggtgcatgttgactgtatgacctcccaaaagcttgtgcgactgccgggattgattgatgtccatgtgcacctgcgggaaccaggtgggacacataaggaggactttgcttcaggcacagccgctgccctggctgggggtatcaccatggtgtgtgccatgcctaatacccggccccccatcattgacgcccctgctctggccctggcccagaagctggcagaggctggcgcccggtgcgactttgcgctattccttggggcctcgtctgaaaatgcaggaaccttgggcaccgtggccgggtctgcagccgggctgaagctttacctcaatgagaccttctctgagctgcggctggacagcgtggtccagtggatggagcatttcgagacatggccctcccacctccccattgtggctcacgcagagcagcaaaccgtggctgctgtcctcatggtggctcagctcactcagcgctcagtgcacatatgtcacgtggcacggaaggaggagatcctgctaattaaagctgcaaaggcacggggcttgccagtgacctgcgaggtggctccccaccacctgttcctaagccatgatgacctggagcgcctggggcctgggaagggggaggtccggcctgagcttggctcccgccaggatgtggaagccctgtgggagaacatggctgtcatcgactgctttgcctcagaccatgctccccataccttggaggagaagtgtgggtccaggcccccacctgggttcccagggttagagaccatgctgccactactcctgacggctgtaagcgagggccggctcagcctggacgacctgctgcagcgattgcaccacaatcctcggcgcatctttcacctgcccccgcaggaggacacctatgtggaggtggatctggagcatgagtggacaattcccagccacatgcccttctccaaggcccactggacaccttttgaagggcagaaagtgaagggcaccgtccgccgtgtggtcctgcgaggggaggttgcctatatcgatgggcaggttctggtacccccgggctatggacaggatgtacggaagtggccacagggggctgttcctcagctcccaccctcagcccctgccactagtgagatgaccacgacacctgaaagaccccgccgtggcatcccagggcttcctgatggccgcttccatctgccgccccgaatccatcgagcctccgacccaggtttgccagctgaggagccaaaggagaagtcctctcggaaggtagccgagccagagctgatgggaacccctgatggcacctgctaccctccaccaccagtaccgagacaggcatctccccagaacctggggacccctggcttgctgcacccccagacctcacccctgctgcactcattagtgggccaacatatcctgtccgtccagcagttcaccaaggatcagatgtctcacctgttcaatgtggcacacacactgcgtatgatggtgcagaaggagcggagcctcgacatcctgaaggggaaggtcatggcctccatgttctatgaagtgagcacacggaccagcagctcctttgcagcagccatggcccggctgggaggtgctgtgctcagcttctcggaagccacatcgtccgtccagaagggcgaatccctggctgactccgtgcagaccatgagctgctatgccgacgtcgtcgtgctccggcacccccagcctggagcagtggagctggccgccaagcactgccggaggccagtgatcaatgctggggatggggtcggagagcaccccacccaggccctgctggacatcttcaccatccgtgaggagctgggaactgtcaatggcatgacgatcacgatggtgggtgacctgaagcacggacgcacagtacattccctggcctgcctgctcacccagtatcgtgtcagcctgcgctacgtggcacctcccagcctgcgcatgccacccactgtgcgggccttcgtggcctcccgcggcaccaagcaggaggaattcgagagcattgaggaggcgctgcctgacactgatgtgctctacatgactcgaatccagaaggaacgatttggctctacccaggagtacgaagcttgctttggtcagttcatcctcactccccacatcatgacccgggccaagaagaagatggtggtgatgcacccgatgccccgtgtcaacgagataagcgtggaagtggactcggatccccgcgcagcctacttccgccaggctgagaacggcatgtacatccgcatggctctgttagccaccgtgctgggccgtttctaggggcctggcttcctcagcctcttctctttaggcccagctgctgggcaaggaattccagtgcctcctacgggggcagcacacttagatattcctggacatccagattgctcacatgtgctgaccacacttcaggctctggactggagctctctggcatgggggtggggcctcagatgctggggcccagtctgccccatcttcattcctgcaccttaaacctgtacagtcatttttctactgacttaataaacagccgagctgtcccttg

SEQ ID NO: 2709 - protein, 2225 aa, Homo sapiens
MAALVLEDGSVLRGQPFGAAVSTAGEVVFQTGMVGYPEALTDPSYKAQILVLTYPLIGNYGIPPDEMDEFGLCKWFESSGIHVAALVVGECCPTPSHWSATRTLHEWLQQHGIPGLQGVDTRELTKKLREQGSLLGKLVQNGTEPSSLPFLDPNARPLVPEVSIKTPRVFNTGGAPRILALDCGLKYNQIRCLCQRGAEVTVVPWDHALDSQEYEGLFLSNGPGDPASYPSVVSTLSRVLSEPNPRPVFGICLGHQLLALAIGAKTYKMRYGNRGHNQPCLLVGSGRCFLTSQNHGFAVETDSLPADWAPLFTNANDGSNEGIVHNSLPFFSVQFHPEHQAGPSDMELLFDIFLETVKEATAGNPGGQTVRERLTERLCPPGIPTPGSGLPPPRKVLILGSGGLSIGQAGEFDYSGSQAIKALKEENIQTLLINPNIATVQTSQGLADKVYFLPITPHYVTQVIRNERPDGVLLTFGGQTALNCGVELTKAGVLARYGVRVLGTPVETIELTEDRRAFAARMAEIGEHVAPSEAANSLEQAQAAAERLGYPVLVRAAFALGGLGSGFASNREELSALVAPAFAHTSQVLVDKSLKGWKEIEYEVVRDAYGNCVTVCNMENLDPLGIHTGESIVVAPSQTLNDREYQLLRQTAIKVTQHLGIVGECNVQYALNPESEQYYIIEVNARLSRSSALASKATGYPLAYVAAKLALGIPLPELRNSVTGGTAAFEPSVDYCVVKIPRWDLSKFLRVSTKIGSCMKSVGEVMGIGRSFEEAFQKALRMVDENCVGFDHTVKPVSDMELETPTDKRIFVVAAALWAGYSVDRLYELTRIDRWFLHRMKRIIAHAQLLEQHRGQPLPPDLLQQAKCLGFSDKQIALAVLSTELAVRKLRQELGICPAVKQIDTVAAEWPAQTNYLYLTYWGTTHDLTFRTPHVLVLGSGVYRIGSSVEFDWCAVGCIQQLRKMGYKTIMVNYNPETVSTDYDMCDRLYFDEISFEVVMDIYELENPEGVILSMGGQLPNNMAMALHRQQCRVLGTSPEAIDSAENRFKFSRLLDTIGISQPQWRELSDLESARQFCQTVGYPCVVRPSYVLSGAAMNVAYTDGDLERFLSSAAAVSKEHPVVISKFIQEAKEIDVDAVASDGVVAAIAISEHVENAGVHSGDATLVTPPQDITAKTLERIKAIVHAVGQELQVTGPFNLQLIAKDDQLKVIECNVRVSRSFPFVSKTLGVDLVALATRVIMGEEVEPVGLMTGSGVVGVKVPQFSFSRLAGADVVLGVEMTSTGEVAGFGESRCEAYLKAMLSTGFKIPKKNILLTIGSYKNKSELLPTVRLLESLGYSLYASLGTADFYTEHGVKVTAVDWHFEEAVDGECPPQRSILEQLAEKNFELVINLSMRGAGGRRLSSFVTKGYRTRRLAADFSVPLIIDIKCTKLFVEALGQIGPAPPLKVHVDCMTSQKLVRLPGLIDVHVHLREPGGTHKEDFASGTAAALAGGITMVCAMPNTRPPIIDAPALALAQKLAEAGARCDFALFLGASSENAGTLGTVAGSAAGLKLYLNETFSELRLDSVVQWMEHFETWPSHLPIVAHAEQQTVAAVLMVAQLTQRSVHICHVARKEEILLIKAAKARGLPVTCEVAPHHLFLSHDDLERLGPGKGEVRPELGSRQDVEALWENMAVIDCFASDHAPHTLEEKCGSRPPPGFPGLETMLPLLLTAVSEGRLSLDDLLQRLHHNPRRIFHLPPQEDTYVEVDLEHEWTIPSHMPFSKAHWTPFEGQKVKGTVRRVVLRGEVAYIDGQVLVPPGYGQDVRKWPQGAVPQLPPSAPATSEMTTTPERPRRGIPGLPDGRFHLPPRIHRASDPGLPAEEPKEKSSRKVAEPELMGTPDGTCYPPPPVPRQASPQNLGTPGLLHPQTSPLLHSLVGQHILSVQQFTKDQMSHLFNVAHTLRMMVQKERSLDILKGKVMASMFYEVSTRTSSSFAAAMARLGGAVLSFSEATSSVQKGESLADSVQTMSCYADVVVLRHPQPGAVELAAKHCRRPVINAGDGVGEHPTQALLDIFTIREELGTVNGMTITMVGDLKHGRTVHSLACLLTQYRVSLRYVAPPSLRMPPTVRAFVASRGTKQEEFESIEEALPDTDVLYMTRIQKERFGSTQEYEACFGQFILTPHIMTRAKKKMVVMHPMPRVNEISVEVDSDPRAAYFRQAENGMYIRMALLATVLGRF

SEQ ID NO: 2710 - DNA, 2233 bp, Homo sapiens
gggacggcgacagcgggtcggcgggccgcaggagggggtcatgggtaaagactactaccagacgttgggcctggcccgcggcgcgtcggacgaggagatcaagcgggcctaccgccgccaggcgctgcgctaccacccggacaagaacaaggagcccggcgccgaggagaagttcaaggagatcgctgaggcctacgacgtgctcagcgacccgcgcaagcgcgagatcttcgaccgctacggggaggaaggcctaaaggggagtggccccagtggcggtagcggcggtggtgccaatggtacctctttcagctacacattccatggagaccctcatgccatgtttgctgagttcttcggtggcagaaatccctttgacaccttttttgggcagcggaacggggaggaaggcatggacattgatgacccattctctggcttccctatgggcatgggtggcttcaccaacgtgaactttggccgctcccgctctgcccaagagcccgcccgaaagaagcaagatcccccagtcacccacgaccttcgagtctcccttgaagagatctacagcggctgtaccaagaagatgaaaatctcccacaagcggctaaaccccgacggaaagagcattcgaaacgaagacaaaatattgaccatcgaagtgaagaaggggtggaaagaaggaaccaaaatcactttccccaaggaaggagaccagacctccaacaacattccagctgatatcgtctttgttttaaaggacaagccccacaatatctttaagagagatggctctgatgtcatttatcctgccaggatcagcctccgggaggctctgtgtggctgcacagtgaacgtccccactctggacggcaggacgatacccgtcgtattcaaagatgttatcaggcctggcatgcggcgaaaagttcctggagaaggcctccccctccccaaaacacccgagaaacgtggggacctcattattgagtttgaagtgatcttccccgaaaggattccccagacatcaagaaccgtacttgagcaggttcttccaatatagctatctgagctccccaaggactgaccagggacctttccagagctcaaggatttctggacctttctaccagttgtggaccatgagagggtgggagggcccagggagggctttcgtactgctgaatgttttccagagcatatattacaatctttcaaagtcgcacactagacttcagtggtttttcgagctatagggcatcaggtggtgggaacagcaggaaaaggcattccagtctgccccactgggtctggcagccctcccgggatgggcccacatccacctccagtccctggccaggggtgagaggcagaccagcagatggacttgatccctctgtgtctttgggcttctggctggtagataatgtcaacctgcagtcttgattcccagaccctgtacactcctccttttctgttgtgtgatcagtttgtgctttattctgtatttgtctcccatgtcttgctcttctcctggagaattctgtcttctctttggccatctcaaattgagaacctaaactattcctgcagaactgcctggttggcgtccacaagcaatacctctcgttccagcaggaccaagggagccagcctccagtgagtgactccagcaagtgcagccacctctcccttgatggtctgggagcctggcctcagcaaggggccttcctgacctctggctccagtgaagctgaatgtcctcactttgtgggtcacactctttacatttctgtaaggcaatcttggcacacgtggggcttaccagtggcccaggtaattttttgtttcatggactatggactctttcaaagggatctgatccttttgaattttgcacagccctagatacaatcccttttgataaaagggtctttgcttctgattacaggagcactgtggaacgtctgtaaatatgtttttataattccatgtatagttggtgtacactcaaaacctgtccccggcagccagtgctctctgtatagggccataatggaattctgaagaaatcttggggagggaaggggagttggaacaaatgtctgttccctggaggccagtccagtgctcagacctttagactcattgtaagttgccactgccaacatgagaccaaagtgtgtgactagtcaatgaagtgcgacagcattaaagactgatgctaaacctc

SEQ ID NO: 2711 - protein, 340 aa, Homo sapiens
MGKDYYQTLGLARGASDEEIKRAYRRQALRYHPDKNKEPGAEEKFKEIAEAYDVLSDPRKREIFDRYGEEGLKGSGPSGGSGGGANGTSFSYTFHGDPHAMFAEFFGGRNPFDTFFGQRNGEEGMDIDDPFSGFPMGMGGFTNVNFGRSRSAQEPARKKQDPPVTHDLRVSLEEIYSGCTKKMKISHKRLNPDGKSIRNEDKILTIEVKKGWKEGTKITFPKEGDQTSNNIPADIVFVLKDKPHNIFKRDGSDVIYPARISLREALCGCTVNVPTLDGRTIPVVFKDVIRPGMRRKVPGEGLPLPKTPEKRGDLIIEFEVIFPERIPQTSRTVLEQVLPI

SEQ ID NO: 2712 - DNA, 1362 bp, Homo sapiens
catttggggacgctctcagctctcggcgcacggcccagcttccttcaaaatgtctactgttcacgaaatcctgtgcaagctcagcttggagggtgatcactctacacccccaagtgcatatgggtctgtcaaagcctatactaactttgatgctgagcgggatgctttgaacattgaaacagccatcaagaccaaaggtgtggatgaggtcaccattgtcaacattttgaccaaccgcagcaatgcacagagacaggatattgccttcgcctaccagagaaggaccaaaaaggaacttgcatcagcactgaagtcagccttatctggccacctggagacggtgattttgggcctattgaagacacctgctcagtatgacgcttctgagctaaaagcttccatgaaggggctgggaaccgacgaggactctctcattgagatcatctgctccagaaccaaccaggagctgcaggaaattaacagagtctacaaggaaatgtacaagactgatctggagaaggacattatttcggacacatctggtgacttccgcaagctgatggttgccctggcaaagggtagaagagcagaggatggctctgtcattgattatgaactgattgaccaagatgctcgggatctctatgacgctggagtgaagaggaaaggaactgatgttcccaagtggatcagcatcatgaccgagcggagcgtgccccacctccagaaagtatttgataggtacaagagttacagcccttatgacatgttggaaagcatcaggaaagaggttaaaggagacctggaaaatgctttcctgaacctggttcagtgcattcagaacaagcccctgtattttgctgatcggctgtatgactccatgaagggcaaggggacgcgagataaggtcctgatcagaatcatggtctcccgcagtgaagtggacatgttgaaaattaggtctgaattcaagagaaagtacggcaagtccctgtactattatatccagcaagacactaagggcgactaccagaaagcgctgctgtacctgtgtggtggagatgactgaagcccgacacggcctgagcgtccagaaatggtgctcaccatgcttccagctaacaggtctagaaaaccagcttgcgaataacagtccccgtggccatccctgtgagggtgacgttagcattacccccaacctcattttagttgcctaagcattgcctggccttcctgtctagtctctcctgtaagccaaagaaatgaacattccaaggagttggaagtgaagtctatgatgtgaaacactttgcctcctgtgtactgtgtcataaacagatgaataaactgaatttgtacttt

SEQ ID NO: 2713 - protein, 339 aa, Homo sapiens
MSTVHEILCKLSLEGDHSTPPSAYGSVKAYTNFDAERDALNIETAIKTKGVDEVTIVNILTNRSNAQRQDIAFAYQRRTKKELASALKSALSGHLETVILGLLKTPAQYDASELKASMKGLGTDEDSLIEIICSRTNQELQEINRVYKEMYKTDLEKDIISDTSGDFRKLMVALAKGRRAEDGSVIDYELIDQDARDLYDAGVKRKGTDVPKWISIMTERSVPHLQKVFDRYKSYSPYDMLESIRKEVKGDLENAFLNLVQCIQNKPLYFADRLYDSMKGKGTRDKVLIRIMVSRSEVDMLKIRSEFKRKYGKSLYYYIQQDTKGDYQKALLYLCGGDD

SEQ ID NO: 2714 - DNA, 1009 bp, Homo sapiens
acagccctgcgcctgcgcgtgggcctgggccgcccgtcgtacctgatggtaggaggcagtagttccccgcttcccttccgcgggagggagagttagctagccatccaagaaaacaccatgaaagataacgatatcaagagactactgtatacccatcttttatgcatattttcaattatcctaagtgtcttcattccatcactcttcttggagaacttctcaatattggaaacacacttgacatggttgtgcatctgttctggttttgtaactgctgtcaatctagtactatatttagtagtgaaaccaaatacatcctctaaaagaagttcattatcacacaaggtaactggatttttgaaatgctgtatctactttcttatgtcttgtttctcctttcatgtaatttttgttctgtatggagcaccactgatagagttggcattggaaacatttttatttgcagttattttgtctacttttactactgtgccttgcttatgtttgttaggaccaaacctcaaagcatggctaagagtgttcagtagaaatggagttacatccatatgggagaatagtctccagatcactacaatttctagctttgtaggagcatggcttggagcacttcctattccactggattgggaaagaccatggcaggtatggcccatctcctgtacgcttggagcgacctttggctacgtggctggccttgttatttcaccactctggatatactggaatagaaagcaacttacatacaagaacaattaactggagcaaagggagatatttctttgtgcagattctgtaagggctgggcagaaatgtgtatggtcaaagccaagcagttccatttacagctctgttttttacgtagttacaacatgatgtgattgtagctttttaaactatgaaacccctgagagattgtaccttctagttgaaataaagtatttataatagattgtggctaaaaaaaaaaaaaaaaaaaaaaaaaaaaaaa

SEQ ID NO: 2715 - protein, 219 aa, Homo sapiens
MKDNDIKRLLYTHLLCIFSIILSVFIPSLFLENFSILETHLTWLCICSGFVTAVNLVLYLVVKPNTSSKRSSLSHKVTGFLKCCIYFLMSCFSFHVIFVLYGAPLIELALETFLFAVILSTFTTVPCLCLLGPNLKAWLRVFSRNGVTSIWENSLQITTISSFVGAWLGALPIPLDWERPWQVWPISCTLGATFGYVAGLVISPLWIYWNRKQLTYKNN

SEQ ID NO: 2716 - DNA, 1083 bp, Homo sapiens
acagccctgcgcctgcgcgtgggcctgggccgcccgtcgtacctgatggtaggaggcagtagttccccgcttcccttccgcgggagggagagttagctagccatccaagaaaacaccatgaaagataacgatatcaagagactactgtatacccatcttttatgcatattttcaattatcctaagtgtcttcattccatcactcttcttggagaacttctcaatattggaaacacacttgacatggttgtgcatctgttctggttttgtaactgctgtcaatctagtactatatttagtagtgaaaccaaatacatcctctaaaagaagttcattatcacacaaggtaactggatttttgaaatgctgtatctactttcttatgtcttgtttctcctttcatgtaatttttgttctgtatggagcaccactgatagagttggcattggaaacatttttatttgcagttattttgtctacttttactactgtgccttgcttatgtttgttaggaccaaacctcaaagcatggctaagagtgttcagtagaaatggagttacatccatatgggagaatagtctccagatcactacaatttctagctttgtaggagcatggcttggagcacttcctattccactggattgggaaagaccatggcagatgacagtagaaagaaaacgtagcacttatagatctctccatgtaccctgcagggggcttggtactgtgaaatgagtaacttaatcctgacaaccgtagtgcaaggtatggcccatctcctgtacgcttggagcgacctttggctacgtggctggccttgttatttcaccactctggatatactggaatagaaagcaacttacatacaagaacaattaactggagcaaagggagatatttctttgtgcagattctgtaagggctgggcagaaatgtgtatggtcaaagccaagcagttccatttacagctctgttttttacgtagttacaacatgatgtgattgtagctttttaaactatgaaacccctgagagattgtaccttctagttgaaataaagtatttataatagattgtggct

SEQ ID NO: 2717 - protein, 206 aa, Homo sapiens
MKDNDIKRLLYTHLLCIFSIILSVFIPSLFLENFSILETHLTWLCICSGFVTAVNLVLYLVVKPNTSSKRSSLSHKVTGFLKCCIYFLMSCFSFHVIFVLYGAPLIELALETFLFAVILSTFTTVPCLCLLGPNLKAWLRVFSRNGVTSIWENSLQITTISSFVGAWLGALPIPLDWERPWQMTVERKRSTYRSLHVPCRGLGTVK

SEQ ID NO: 2718 - DNA, 1688 bp, Homo sapiens
ctcagactccccagtacaatgactcaagcagaaattaagctctgttctttgttgctgcaagagcattttggagagattgtagaaaaaattggagtccatctgataagaaccggcagccagccactaagagtaattgcccatgacacaggaacatcactggatcaggtgaagaaagccctgtgtgtcctcgtccaacataacctggtgagttatcaagtgcacaaacgtggtgtggtggagtatgaagcccagtgcagccgggtattgcgaatgcttagatatccccggtacatctatactaccaaaactctgtacagtgacactggagagctgattgttgaggagcttctgttgaacggcaaactgacaatgtcagctgttgtgaagaaagtggcagaccggctcacagagaccatggaggatggcaagaccatggactatgctgaagtatcaaacacatttgtgcgactggcagacacacactttgtacaacgctgcccttcggtacctaccactgagaattcagaccctgggccaccaccacctgcccccacacttgtcattaatgaaaaggacatgtacctggttcctaaactcagcttgatagggaaaggtaaaaggaggagatcatctgatgaagatgctgctggggagcccaaggccaagagaccaaaatatactacagataacaaggagcccattccagatgatgggatttattggcaggccaaccttgacagattccaccaacacttccgtgaccaagccattgtgagcgcagttgctaacaggatggaccagacaagcagcgagattgtgcgaaccatgctccgaatgagtgagattaccacttcctctagtgctcccttcacccagccattgtcttccaatgagatcttcagatccctacctgttggctataacatctctaagcaagttcttgatcagtatctcactctgctggcagatgatccactagagtttgttggaaagtctggcgacagtggtggaggaatgtatgtcatcaacctccataaggcattagcatccctagccacagccactctggagtccgtcgtacaggagagatttgggtctcgctgtgctagaatattccgtctagttttgcagaagaaacacatagagcagaagcaagtggaagactttgcaatgattcctgcaaaggaggcaaaggatatgctatataagatgctctcagaaaatttcatgtcactccaggaaattcccaaaacaccagaccatgccccatccaggaccttctatttatatactgtgaacatcctgtcagctgcccgaatgttgttgcacaggtgctacaagagcatagccaacttgatagaaaggaggcaatttgaaaccaaagagaataagcgtctactagaaaaatctcagagggtagaagccatcattgcatctatgcaggctactggtgcagaggaagcacagttacaagaaatagaggagatgatcacagctcctgaacgtcagcagctagagaccctgaaacgtaatgtcaacaagttggatgccagtgagatccaggtggacgaaaccatcttcctgctggagtcttacattgagtgcaccatgaagagacagtgatccagaagaagcatcttcctcagaagatctggggggatggaaagcaaaataaaggaggtgcctgg

SEQ ID NO: 2719 - protein, 534 aa, Homo sapiens
MTQAEIKLCSLLLQEHFGEIVEKIGVHLIRTGSQPLRVIAHDTGTSLDQVKKALCVLVQHNLVSYQVHKRGVVEYEAQCSRVLRMLRYPRYIYTTKTLYSDTGELIVEELLLNGKLTMSAVVKKVADRLTETMEDGKTMDYAEVSNTFVRLADTHFVQRCPSVPTTENSDPGPPPPAPTLVINEKDMYLVPKLSLIGKGKRRRSSDEDAAGEPKAKRPKYTTDNKEPIPDDGIYWQANLDRFHQHFRDQAIVSAVANRMDQTSSEIVRTMLRMSEITTSSSAPFTQPLSSNEIFRSLPVGYNISKQVLDQYLTLLADDPLEFVGKSGDSGGGMYVINLHKALASLATATLESVVQERFGSRCARIFRLVLQKKHIEQKQVEDFAMIPAKEAKDMLYKMLSENFMSLQEIPKTPDHAPSRTFYLYTVNILSAARMLLHRCYKSIANLIERRQFETKENKRLLEKSQRVEAIIASMQATGAEEAQLQEIEEMITAPERQQLETLKRNVNKLDASEIQVEETIFLLESYIECTMKRQ

SEQ ID NO: 2720 - DNA, 1636 bp, Homo sapiens
gaattccggctctctgggtgagagaccgagaggggcatatccgttcacgccgatccatgaaaatgctttggaaattgacggataatatcaagtacgaggactgcgaggaccgtcacgacggcaccagcaacgggacggcacggttgccccagctgggcactgtaggtcaatctccctacacgagcgccccgccgctgtcccacacccccaatgccgacttccagcccccatacttccccccaccctaccagcctatctacccccagtcgcaagatccttactcccacgtcaacgacccctacagcctgaaccccctgcacgcccagccgcagccgcagcacccaggctggcccggccagaggcagagccaggagtctgggctcctgcacacgcaccgggggctgcctcaccagctgtcgggcctggatcctcgcagggactacaggcggcacgaggacctcctgcacggcccacacgcgctcagctcaggactcggagacctctcgatccactccttacctcacgccatcgaggaggtcccgcatgtagaagacccgggtattaacatcccagatcaaactgtaattaagaaaggccccgtgtccctgtccaagtccaacagcaatgccgtctccgccatccctattaacaaggacaacctcttcggcggcgtggtgaaccccaacgaagtcttctgttcagttccgggtcgcctctcgctcctcagctccacctcgaagtacaaggtcacggtggcggaagtgcagcggcggctctcaccacccgagtgtctcaacgcgtcgctgctgggcggagtgctccggagggcgaagtctaaaaatggaggaagatctttaagagaaaaactggacaaaataggattaaatctgcctgcagggagacgtaaagctgccaacgttaccctgctcacatcactagtagagggagaagctgtccacctagccagggactttgggtacgtgtgcgaaaccgaatttcctgccaaagcagtagctgaatttctcaaccgacaacattccgatcccaatgagcaagtgacaagaaaaaacatgctcctggctacaaaacagatatgcaaagagttcaccgacctgctggctcaggaccgatctcccctggggaactcacggcccaaccccatcctggagcccggcatccagagctgcttgacccacttcaacctcatctcccacggcttcggcagccccgcggtgtgtgccgcggtcacggccctgcagaactatctcaccgaggccctcaaggccatggacaaaatgtacctcagcaacaaccccaacagccacacggacaacaacgccaaaagcagtgacaaagaggagaagcacagaaagtgaggctctcctcccgccccgcccctcccacgcctcaccagccccccgcgcgcccaccctccggcgggtgacagctccgggatcagcaacccttcctgctgctgctactgctgctgctgctgccgccgccgccgccgccgctgcccttgggtccccccgagtctccgggactgccctctcgactgtcagtggggcagcctctccgactctgcacccgcctcgacctccccacccgctcccacacccctgtgcccccggaattc

SEQ ID NO: 2721 - protein, 437 aa, Homo sapiens
MLWKLTDNIKYEDCEDRHDGTSNGTARLPQLGTVGQSPYTSAPPLSHTPNADFQPPYFPPPYQPIYPQSQDPYSHVNDPYSLNPLHAQPQPQHPGWPGQRQSQESGLLHTHRGLPHQLSGLDPRRDYRRHEDLLHGPHALSSGLGDLSIHSLPHAIEEVPHVEDPGINIPDQTVIKKGPVSLSKSNSNAVSAIPINKDNLFGGVVNPNEVFCSVPGRLSLLSSTSKYKVTVAEVQRRLSPPECLNASLLGGVLRRAKSKNGGRSLREKLDKIGLNLPAGRRKAANVTLLTSLVEGEAVHLARDFGYVCETEFPAKAVAEFLNRQHSDPNEQVTRKNMLLATKQICKEFTDLLAQDRSPLGNSRPNPILEPGIQSCLTHFNLISHGFGSPAVCAAVTALQNYLTEALKAMDKMYLSNNPNSHTDNNAKSSDKEEKHRK

SEQ ID NO: 2722 - DNA, 1399 bp, Homo sapiens
cttaccgtggcgagttccgcgctcaatggagacgtttgaccccaccgagctgcccgagctgcttaaactttattaccggaggctctttccctactctcagtactatcgctggctcaactacggtggagtgataaagaattactttcaacaccgtgaattttcattcacactgaaagatgatatttacattcgctaccaatccttcaacaaccagagtgatctggaaaaggagatgcagaaaatgaatccatacaagattgatataggcgcagtatattctcacagacccaatcaacacaatacagtgaagctgggagctttccaggctcaggaaaaagaactggtatttgacattgacatgacagactacgacgatgtgaggagatgttgtagttctgcagacatatgtcctaagtgctggaccctcatgacaatggccatacgcatcattgacagagcattgaaggaggactttggatttaagcatcgtctctgggtatattctggaaggagaggtgttcattgttgggtctgtgatgaatcagttagaaaactgtcttctgcagtacgttctgggatagttgagtatttgagccttgtaaagggtggtcaagacgttaaaaagaaagttcacctaagtgaaaaaattcacccttttatcagaaaatctataaacataataaaaaaatactttgaagaatatgccttggttaatcaagatattctcgaaaataaagaaagctgggataagattttagcccttgttcctgaaacaattcatgatgaacttcaacaaagcttccaaaagtctcacaattcacttcagcgttgggagcacttgaagaaagtagccagcagatatcagaataacatcaaaaatgacaaatatggaccctggctggagtgggagattatgctccagtactgttttccacggctggatatcaatgtcagcaaaggaatcaatcatctactgaagagcccttttagtgttcatcctaaaacaggtcgcatctctgtgcctattgatttgcagaaagtggaccagtttgatccatttactgttccgaccataagcttcatctgccgtgaattggatgccatttccactaatgaagaggaaaaagaggagaatgaagctgaatctgatgtcaaacatagaaccagagattataagaagaccagtctagcaccttatgtgaaagtttttgaacattttcttgaaaatctggataaatcccgaaaaggagaacttcttaagaagagtgatttacaaaaagatttctgaagacagagctcctcaaaccattgtggatatcttctgccttcaaccacagatcaaatacttcaagagccatttaataaatatggcagaactataaagaaaaaaaaaaaaagg

SEQ ID NO: 2723 - protein, 420 aa, Homo sapiens
METFDPTELPELLKLYYRRLFPYSQYYRWLNYGGVIKNYFQHREFSFTLKDDIYIRYQSFNNQSDLEKEMQKMNPYKIDIGAVYSHRPNQHNTVKLGAFQAQEKELVFDIDMTDYDDVRRCCSSADICPKCWTLMTMAIRIIDRALKEDFGFKHRLWVYSGRRGVHCWVCDESVRKLSSAVRSGIVEYLSLVKGGQDVKKKVHLSEKIHPFIRKSINIIKKYFEEYALVNQDILENKESWDKILALVPETIHDELQQSFQKSHNSLQRWEHLKKVASRYQNNIKNDKYGPWLEWEIMLQYCFPRLDINVSKGINHLLKSPFSVHPKTGRISVPIDLQKVDQFDPFTVPTISFICRELDAISTNEEEKEENEAESDVKHRTRDYKKTSLAPYVKVFEHFLENLDKSRKGELLKKSDLQKDF

SEQ ID NO: 2724 - DNA, 6681 bp, Homo sapiens
cttcccctaccctccaccgtccgggagccgccgccaccgccgccgaggagtcaggaagttcaagatggccgccgcggagacccagtcgctacgggagcagccagagatggaagatgctaattctgaaaagagtataaatgaagaaaatggagaagtatcagaagaccagtctcaaaataagcacagtcgtcacaaaaaaaagaagcataaacacagaagtaaacataagaaacataaacattcctcagaagaagacaaggataaaaaacataaacataagcataaacataagaaacacaaaagaaaagaggttattgatgcttctgataaagagggtatgtctccagcaaaaagaactaaacttgatgatttagctttgctagaagacttggaaaaacagagagccttgattaaggccgaacttgataatgagttaatggaaggaaaggtccagtctggtatggggctcattttgcaaggttatgagtctggctctgaagaagagggggaaattcatgaaaaggcaagaaatggaaataggtctagtactagatcttcaagtacaaaggggaaacttgaacttgtggacaataaaattactacaaagaaacgaagtaaaagcagatccaaagaacggactagacataggtctgataaaaagaaaagtaaggggggtattgaaatcgttaaagagaaaacaactaggagcaagtcaaaggagaggaaaaaatctaaaagcccatccaaaagaagtaagtctcaagatcaagcaaggaaatcaaaatcccctacccttagaaggcgatctcaagagaaaattggtaaggccagatctcctactgatgataaggttaaaattgaagataaaagtaaatcaaaagataggaaaaaatccccaattataaatgaaagtagaagtcgcgatcgaggtaaaaaatccagatccccagttgatttaagaggtaaatccaaagacagaaggtcacggtccaaagagagaaaatcaaaacggtctgaaactgataaagaaaagaagccaattaaatctccctctaaagatgcttcatctgggaaagaaaataggtcacccagcagaagacctggtcgtagtcctaaaagaagaagtttgtctccaaaaccacgtgataaatcaagaagaagcaggtctccacttttgaatgatagaagatctaagcagagcaaatccccctcgcggacactgtctcctgggagaagagccaagagccgatccttagaaagaaaacgacgagaaccagagaggagacgactttcttctccaagaacacgacctcgagatgatatcctcagtagacgtgaaagatcaaaagatgccagccccatcaatagatggtctccaacccgaagaagaagtagatctcccattagaaggaggtctcgttccccactcagacgtagcaggtctccaagaagaagaagcagatctcctcggagaagggacagaggtcggaggagcagatcacgcttgcgaaggcggtctcgatcacgcggtggtcgtagacgaaggagcagaagcaaagtaaaggaagataaatttaaaggaagtctttctgaaggaatgaaagttgagcaggaatcttcgtctgatgataaccttgaagactttgatgtagaggaagaagatgaagaagccctaatagaacagagaagaatccaaaggcaggcaattgttcagaaatataaataccttgctgaagatagcaacatgtctgtgccatctgaaccaagcagcccccagagcagtacgagaacacgatcaccatctccagatgacattctggagcgagtagctgctgatgttaaagagtatgaacgggaaaatgttgatacatttgaggcctcagtgaaagccaagcataatctaatgacagttgaacagaataatggttcatctcagaagaagttgttggcacctgatatgtttacagaatctgatgatatgtttgctgcgtattttgatagtgctcgtcttcgggccgctggcattggaaaagatttcaaagagaatcccaacctcagagataactggaccgatgcagaaggctattatcgtgtgaacataggtgaagtcctagataaacgttacaatgtgtatggctacactgggcaaggtgtattcagtaatgttgtacgagccagagataatgcaagagccaaccaagaagtggctgtaaagatcatcagaaacaatgagctcatgcaaaagactggtttaaaagaattagagttcttgaaaaaacttaatgatgctgatcctgatgacaaatttcattgtctgagactcttcaggcacttctatcacaagcagcatctttgtctggtattcgagcctctcagcatgaacttacgagaggtgttaaaaaaatatggtaaagatgttggtcttcatattaaagctgtaagatcctatagtcagcagttgttcctggcattgaaactccttaaaagatgcaatatcctacatgcagatatcaagccagacaatatcctggttaatgaatccaaaactattttaaagctttgcgattttgggtcggcttcacatgttgcggataatgacataacaccttatcttgtcagtagattttatcgtgctcctgaaatcattataggtaaaagctatgactatggtatagatatgtggtctgtaggttgcaccttatacgaactctatactggaaaaattttattccctggcaaaaccaataaccatatgctgaagcttgcaatggatctcaaaggaaagatgccaaataagatgattcgaaaaggtgtgttcaaagatcagcattttgatcaaaatctcaacttcatgtacatagaagttgataaagtaacagagagggagaaagttactgttatgagcaccattaatccaactaaggacctgttggctgacttgattgggtgccagagacttcctgaagaccaacgtaagaaagtacaccagctaaaggacttgttggaccagattctgatgttggacccagctaaacgaattagcatcaaccaggccctacagcacgccttcatccaggaaaaaatttaaacaagatgaagaaactccaagggtttgagtaaatacaaagactgaagaaatttcacagcagtttattaatgtatataaacttataaatatttctccagcaaatttgaggaagcatgatatatttgaattaacaccaagggtgatatttcttttagagatgttagttaatctgttttgtgtcttacgtgaaatttcactgtagactgttttaaattgccaagactgcacaaaattacagtgctaatgtatatggttgcagttcacataaagacaaaagcatctgttatgaaatgagtagtaatattgggtggttgatttgttcttagcagacttggcttcattttggtcttgagataaaatggccagcataaatgctgtttatattcacgttttcctaggtgtgtgtgtgcaggccacagcagcatgcccttggtgtagtcagtgccgaaaggggtctgttccttcttgagcctgcctgcagggatggtctccttttaaagcaggttgtgtgcagcattcagtacactgaaggtaagctaaaccatcaacatctctggtgttttaagatgttattttattggaacaactgacaaatgagggatgttagctttgtggcagaattccctgcatgtgtgataactgatcttgttttattttttggcattgcaactgtggcatagttacaatttctgtttgttcatcacatttaaaattggaagagaacgcgcttgatggatagagcgccttcagtgtactgtttcttattaactttactttttttaaatcaacttgctatagactttatatacattttgttaaatatagttcctagtgacatagaaacgatgcgtagttttcatttactaattacaaatgttgaggcctaattctgaaagtcctcatatttaaaggctagacaacgtaatgaaatttttaactatttgtatgtcattttgaaagtgtactgctttatggtaaaagtgtttttcatttgttcattgttttcattatttgtgatcatgttgtctttcaatacaggcataaaccttccactcttgaacaaagcagctgctttttaaaagcggtaattgcttctttaccttttatttcttttgtaaatgaagcttttctttaagaatgtgactttaaagtgttgtctattgcataaaacagttgacactcacttattgtaaagtgaagattgttctactgcatgtgaagtggaccatgcagatttctgtatgttctcagtatgcatcactagataataaagtcttttgtgaacaaggcatttgtagccatttttaaaagtttttgtcttcagtgctggtaagtcaggtaaaccataaatagttaaaagcaaccttttgtttttttcctgaaagtttttaattgaaagtattattagttaaagatgtaaacctagccaaaattaccagtttattaataattaggatcctaattatttcaaaaaatcctacaaatattgtcagctttcagtgtagtgagattattcctgtaggttatggggtataattcaggatttaactaatgtttctgctattttctcacttttccttttgatggtgcggaaagagaaaaaggaaaacggggcacaggccattcgacgccttctccaaggggtctgatttgctgagacaccagcttcaccttcttaacaaggtgcagctcagtggaagatgatgacaaccagaagacatgagctaaggtttctgtcctataaaagatttattaaaaaacaatccttcatttattttttgtctaattttttagttttcagcattatgatttgggttttattggtgtttggtatttagaattagtgctgttgtggagtgcgtctgtaaagtgcttgttttatcatacttcctgcctctcccctcccccagtttctcctcccctaaaataaaaatagtggtcaactttagtaatataaaaggctgctggatgctgagattccacataacacatggttgtcaaaattggatgttaaggattcttagaaaaacagcaaccaccagaatagcatatatctaaaagtagtcttcagctttaggcagatgcaaaagaatacaaactggaatattaagaatactgttcaactcctttagtatctgttccccaacttaccctgtagaaacctcgttattaaccagtgttccagtcttaaagtagacaaaatattcagagccattttttttaagggaaatgaaaaagatactctgggttttttatactccccaatttagcatatctagactacctatttgaaaggaaccctatcaactgtcttatgtacgttacatgattttcctacactctgtaattttgctgaggtgcaatttggaactctgcaagacctactagattgaatttatttagtgaatgctcctgaataaatgtgcattcctcttttagagtagctgtatgcttttcaaatgctatctgccgtgaattttttgcttttattatactttatggcaaaagtgatatcaagtgattgtcagacttgagggctcatagaagtgttaggtacggctctcaaagatgttacagttttttctagggttgggagaatagttgagatctggaaagcatagacattttttacactctggatagactttattcttgaagatcatcagaaatgaggttggaatttcgaggttttgagcagggggagcatcttatattcacccttaaatcgttattaatacatcctgttttcttcattccctgatagctatctcatttcactctactgtctcaaaattttgttttaaaataatagaaatgttttgccattattaagtaccactttattcctaacaaaaataagtactcaggacttttttttcaaaatgaaatatttatgtactgttttatggtatgtggtagagtaagtaaaatgtaatgttctcagttttgttccatatttgcattcctcttatgctttacctgtattttatcatttgtaagcagaactctagctatatggggtagaaataaaatctctgagatgaaacaaaggaatcaacatgataaaatttaggcgaagtagttaagaaatggcccttttgaatgttgaagataggaaagaaagccatatattcaaatatgtaattttcctcatttagttataatgacatctttaccaattgggcttcataaatgtgtttctttcttaatagtatcctagttccagcatatattcaacatgaattttatcattctcctcctaatggaatgtcttccttatagaaatgttcacgacaaattcatttgtgttttttacatgtcaataatgtatgctaaattaaaatgttttccagttattctgatagatgtcattatggcatccttaatttttcttctccttctgtatatagggtaagggactgttctgaagaacctttccatttagtgatcaagatatggaagctgatttctgaaaatgctcagtgtgtactctaattatttatggtaccatttgaattgtaacttgcattttagcagtgcatgtttctaattgacttactgggaaactgaataaaatatgcctcttattatca

SEQ ID NO: 2725 - protein, 1007 aa, Homo sapiens
MAAAETQSLREQPEMEDANSEKSINEENGEVSEDQSQNKHSRHKKKKHKHRSKHKKHKHSSEEDKDKKHKHKHKHKKHKRKEVIDASDKEGMSPAKRTKLDDLALLEDLEKQRALIKAELDNELMEGKVQSGMGLILQGYESGSEEEGEIHEKARNGNRSSTRSSSTKGKLELVDNKITTKKRSKSRSKERTRHRSDKKKSKGGIEIVKEKTTRSKSKERKKSKSPSKRSKSQDQARKSKSPTLRRRSQEKIGKARSPTDDKVKIEDKSKSKDRKKSPIINESRSRDRGKKSRSPVDLRGKSKDRRSRSKERKSKRSETDKEKKPIKSPSKDASSGKENRSPSRRPGRSPKRRSLSPKPRDKSRRSRSPLLNDRRSKQSKSPSRTLSPGRRAKSRSLERKRREPERRRLSSPRTRPRDDILSRRERSKDASPINRWSPTRRRSRSPIRRRSRSPLRRSRSPRRRSRSPRRRDRGRRSRSRLRRRSRSRGGRRRRSRSKVKEDKFKGSLSEGMKVEQESSSDDNLEDFDVEEEDEEALIEQRRIQRQAIVQKYKYLAEDSNMSVPSEPSSPQSSTRTRSPSPDDILERVAADVKEYERENVDTFEASVKAKHNLMTVEQNNGSSQKKLLAPDMFTESDDMFAAYFDSARLRAAGIGKDFKENPNLRDNWTDAEGYYRVNIGEVLDKRYNVYGYTGQGVFSNVVRARDNARANQEVAVKIIRNNELMQKTGLKELEFLKKLNDADPDDKFHCLRLFRHFYHKQHLCLVFEPLSMNLREVLKKYGKDVGLHIKAVRSYSQQLFLALKLLKRCNILHADIKPDNILVNESKTILKLCDFGSASHVADNDITPYLVSRFYRAPEIIIGKSYDYGIDMWSVGCTLYELYTGKILFPGKTNNHMLKLAMDLKGKMPNKMIRKGVFKDQHFDQNLNFMYIEVDKVTEREKVTVMSTINPTKDLLADLIGCQRLPEDQRKKVHQLKDLLDQILMLDPAKRISINQALQHAFIQEKI

SEQ ID NO: 2726 - DNA, 2395 bp, Homo sapiens
gccgccgtcggcgcgctgggtgcgggaagggggctctggatttcggtccctcccctttttcctctgagtctcggaacgctccagctctcagaccctcttcctcccaggtaaaggccgggagaggagggcgcatctcttttccaggcaccccaccatgggcaatgcctccaatgactcccagtctgaggactgcgagacgcgacagtggcttcccccaggcgaaagcccagccatcagctccgtcatgttctcggccggggtgctggggaacctcatagcactggcgctgctggcgcgccgctggcggggggacgtggggtgcagcgccggccgcaggagctccctctccttgttccacgtgctggtgaccgagctggtgttcaccgacctgctcgggacctgcctcatcagcccagtggtactggcttcgtacgcgcggaaccagaccctggtggcactggcgcccgagagccgcgcgtgcacctacttcgctttcgccatgaccttcttcagcctggccacgatgctcatgctcttcgccatggccctggagcgctacctctcgatcgggcacccctacttctaccagcgccgcgtctcgcgctccgggggcctggccgtgctgcctgtcatctatgcagtctccctgctcttctgctcgctgccgctgctggactatgggcagtacgtccagtactgccccgggacctggtgcttcatccggcacgggcggaccgcttacctgcagctgtacgccaccctgctgctgcttctcattgtctcggtgctcgcctgcaacttcagtgtcattctcaacctcatccgcatgcaccgccgaagccggagaagccgctgcggaccttccctgggcagtggccggggcggccccggggcccgcaggagaggggaaagggtgtccatggcggaggagacggaccacctcattctcctggctatcatgaccatcaccttcgccgtctgctccttgcctttcacgatttttgcatatatgaatgaaacctcttcccgaaaggaaaaatgggacctccaagctcttaggtttttatcaattaattcaataattgacccttgggtctttgccatccttaggcctcctgttctgagactaatgcgttcagtcctctgttgtcggatttcattaagaacacaagatgcaacacaaacttcctgttctacacagtcagatgccagtaaacaggctgacctttgaggtcagtagtttaaaagttcttagttatatagcatctggaagatcattttgaaattgttccttggagaaatgaaaacagtgtgtaaacaaaatgaagctgccctaataaaaaggagtatacaaacatttaagctgtggtcaaggctacagatgtgctgacaaggcacttcatgtaaagtgtcagaaggagctacaaaacctaccctcagtgagcatggtacttggcctttggaggaacaatcggctgcattgaagatccagctgcctattgatttaagctttcctgttgaatgacaaagtatgtggttttgtaatttgtttgaaaccccaaacagtgactgtactttctattttaatcttgctactaccgttatacacatatagtgtacagccagaccagattaaacttcatatgtaatctctaggaagtcaatatgtggaagcaaccaagcctgctgtcttgtgatcacttagcgaaccctttatttgaacaatgaagttgaaaatcataggcaccttttactgtgatgtttgtgtatgtgggagtactctcatcactacagtattactcttacaagagtggactcagtgggttaacatcagttttgtttactcatcctccaggaactgcaggtcaagttgtcaggttatttattttataatgtccatatgctaatagtgatcaagaagactttaggaatggttctctcaacaagaaataatagaaatgtctcaaggcagttaattctcattaatactcttattatcctatttctgggggaggatgtacgtggccatgtatgaagccaaatattaggcttaaaaactgaaaaatctggttcattcttcagatatactggaacccttttaaagttgatattggggccatgagtaaaatagattttataagatgactgtgttgtaccaaaattcatctgtctatattttatttagggaacatggtttgactcatcttatatgggaaaccatgtagcagtgagtcatatcttaatatatttctaaatgtttggcatgtaaatgtaaactcagcatcaaaatatttcagtgaatttgcactgtttaatcatagttactgtgtaaactcatctgaaatgttacaaaaataaactataaaacaaaaatttgaaaaaaaaaaaaaaaaaa

SEQ ID NO: 2727 - protein, 358 aa, Homo sapiens
MGNASNDSQSEDCETRQWLPPGESPAISSVMFSAGVLGNLIALALLARRWRGDVGCSAGRRSSLSLFHVLVTELVFTDLLGTCLISPVVLASYARNQTLVALAPESRACTYFAFAMTFFSLATMLMLFAMALERYLSIGHPYFYQRRVSASGGLAVLPVIYAVSLLFCSLPLLDYGQYVQYCPGTWCFIRHGRTAYLQLYATLLLLLIVSVLACNFSVILNLIRMHRRSRRSRCGPSLGSGRGGPGARRRGERVSMAEETDHLILLAIMTITFAVCSLPFTIFAYMNETSSRKEKWDLQALRFLSINSIIDPWVFAILRPPVLRLMRSVLCCRISLRTQDATQTSCSTQSDASKQADL

SEQ ID NO: 2728 - DNA, 3204 bp, Homo sapiens
ccgtgagtctgaccttaggtgtctcgtgtctggggttgatccgagctgtcgccgccgccgccgcaatgggcaaaacggccaactctccgggttcgggagcccgacccgacccggtgcggagcttcaatcgctggaagaaaaaacacagccataggcagaacaaaaagaagcagttgaggaagcaactgaagaaacccgaatggcaggtcgagcgcgagagtatcagccgcctcatgcagaactatgaaaagataaatgtaaatgaaatcacaagattttcagattttcccttgtccaaaaaaacattgaaaggtttgcaagaagctcagtaccgtttggtgactgagatacagaagcagaccattggattggctttgcaaggtaaagatgtacttggagcggccaaaactggatctggcaagactctggcttttcttgttccagtgctggaagccttatatcgtctgcaatggacttcaacagatgggctgggggttctcataatatcacctacgagagaactggcctatcagacctttgaggttctccgaaaagtaggaaagaatcatgacttctcagctggtctcatcattggtggaaaggatctaaaacacgaagctgagaggatcaacaacataaatatactcgtgtgcacaccaggtcggcttcttcaacacatggatgaaacagtatcttttcatgctaccgacctccaaatgttagttcttgatgaagcagatagaatcttggatatgggctttgctgataccatgaatgctgttattgaaaatctccccaagaaacgtcagactttacttttctcagcaacacaaactaaatctgtaaaggaccttgcacgcttgagtttgaaaaaccctgagtatgtctgggttcatgaaaaagcaaaatatagcacccctgccactttggaacagaactacatagtctgtgagctgcagcaaaaaataagtgtgctgtattcctttttgagaagccatctgaagaagaagagcattgtatttttttccagttgcaaagaggtccagtatctgtaccgagtgttttgccggctacgtcctggtgtttctatccttgcactccatggtcgacagcagcaaatgagaagaatggaagtctataatgagtttgtccgtaagagagctgcagtactctttgctactgatattgcagccaggggtctggatttcccggccgtgaattgggttcttcagtttgattgtcctgaggatgccaacacatatattcacagagcaggtagaactgccaggtacaaagaggatggtgaagctttgctaattttgctaccctcagaaaaagctatggtgcagcagcttcttcagaagaaagtacctgtgaaggaaatcaaaatcaatccagaaaaacttatagatgtccagaaaaaattggaatctattttagctcaagatcaagatttaaaagaaagagctcaaaggtgtttcgtctcctatgtacgatctgtatatctgatgaaggataaagaagtatttgatgtgagcaagttacctatacctgaatatgccctgtctcttggtcttgctgtggcaccacgcgtaagatttcttcagaaaatgcagaaacaacccaccaaagaattggtaaggagccaagccgataaagtaattgagccaagggctccctccctcaccaatgacgaagtggaagaatttagagcctacttcaatgagaaaatgtccatccttcaaaaaggtggaaaaagactcgaagggacagagcacagacaggataatgatactggtaatgaagaacaggaagaagaagaagacgatgaagaagaaatggaagagaaactggcaaaagcaaaaggatctcaagccccatctcttcctaacaccagtgaggcacagaagatcaaggaagttcctacacagttcttggacagagatgaggaggaagaagatgctgatttcttgaaggtgaagcggcataatgtgtttggattggaccttaaagacgagaaaacattacagaagaaagaaccttctaaatccagcatcaagaaaaaaatgaccaaagttgcagaagcaaaaaaagtaatgaagagaaattttaaagtgaataagaagataacatttactgatgaaggggagttggttcagcagtggccacaaatgcagaaatctgccatcaaggatgctgaggaagatgatgacacaggtggtatcaacttacataaagcaaaggaaagacttcaggaagaggacaaatttgacaaagaagaatataggaaaaaaattaaggcaaagcatcgggagaaaagactgaaagaaagggaagccagaagagaagccaacaagagacaagcaaaggccaaagatgaagaggaagcctttctggattggagtgatgatgatgatgatgatgatgatggatttgatccaagcacactcccagatccagataaatacagaagctctgaagattcagatagtgaagatatggaaaataaaataagtgataccaagaagaagcaggggatgaagaagaggagcaacagtgaagtggaagacgtgggaccaacaagtcataacagaaagaaggccaggtgggacactttagagcctttggataccggcctgtctttagcagaggatgaagagctggtgttacatctgctaagaagtcaaagctaaatacttcctgcgcctgccttctccttgaaaccttggttatgactgcgtaggcaagaagttgaaaaacagttgatttgggggcacttaggtaccatatgccccattcccaaagggcacatttctggatagaagcgatcgtatctccaagtccctctcacaggacatgctttgtgccatcactgagcatactcagatcgagggtggatgataccatttcctgaccccgttttccagcatgtgttctgttagatttttatccatgggttcctacgccttgtcattggaaacactgcctttgtcttactggcaagttctggagctcttgtgtcattgttagaaatccctgtcttgcttactgtacagaagtttctgttgctgttaaaattgctcatgatttcgacgtatttaatattttcaaagagactatgatggaccagccctgagaaagaatgagtatttttgaattgagatgatcaataataaacatatttcctataaaaaaaaaaaaaaa

SEQ ID NO: 2729 - protein, 875 aa, Homo sapiens
MGKTANSPGSGARPDPVRSFNRWKKKHSHRQNKKKQLRKQLKKPEWQVERESISRLMQNYEKINVNEITRFSDFPLSKKTLKGLQEAQYRLVTEIQKQTIGLALQGKDVLGAAKTGSGKTLAFLVPVLEALYRLQWTSTDGLGVLIISPTRELAYQTFEVLRKVGKNHDFSAGLIIGGKDLKHEAERINNINILVCTPGRLLQHMDETVSFHATDLQMLVLDEADRILDMGFADTMNAVIENLPKKRQTLLFSATQTKSVKDLARLSLKNPEYVWVHEKAKYSTPATLEQNYIVCELQQKISVLYSFLRSHLKKKSIVFFSSCKEVQYLYRVFCRLRPGVSILALHGRQQQMRRMEVYNEFVRKRAAVLFATDIAARGLDFPAVNWVLQFDCPEDANTYIHRAGRTARYKEDGEALLILLPSEKAMVQQLLQKKVPVKEIKINPEKLIDVQKKLESILAQDQDLKERAQRCFVSYVRSVYLMKDKEVFDVSKLPIPEYALSLGLAVAPRVRFLQKMQKQPTKELVRSQADKVIEPRAPSLTNDEVEEFRAYFNEKMSILQKGGKRLEGTEHRQDNDTGNEEQEEEEDDEEEMEEKLAKAKGSQAPSLPNTSEAQKIKEVPTQFLDRDEEEEDADFLKVKRHNVFGLDLKDEKTLQKKEPSKSSIKKKMTKVAEAKKVMKRNFKVNKKITFTDEGELVQQWPQMQKSAIKDAEEDDDTGGINLHKAKERLQEEDKFDKEEYRKKIKAKHREKRLKEREARREANKRQAKAKDEEEAFLDWSDDDDDDDDGFDPSTLPDPDKYRSSEDSDSEDMENKISDTKKKQGMKKRSNSEVEDVGPTSHNRKKARWDTLEPLDTGLSLAEDEELVLHLLRSQS

SEQ ID NO: 2730 - DNA, 1856 bp, Homo sapiens
ggatgggaagcgagcatggtgagtcctcaagtcgcagctgggcctgccacgtgggagtggagggtggaggaacgtgtggagtttcggagtccagcccagtgcgagacagccttgaaaccgtggttggcgggcgctccactccgctctgggctcgaaccctgcctgaccctagctgtgccccccactttctccctgtctggcccctgctccccgccccctcacttagaggagggcacggggaagggcaaacggtccagagggcgggcggctgcgggctcctctgcatcatgtgaggagggcgtggggaaggacatcctggtggggcccgatctgggctgcctccagcccgggcctgtgtcttggacttagtcgtggacctggaggccagtgcccggctggccctgtcaccctctcgctgtgacgccagcgcctgctgactggaggacccaggttccttcgcctgctttttctcaggctgccctgaggatctgtgtttggtgaaaaggagccaaattcacctgcagggcaggcggctctagcagcttcagaagcctggtgccctggcgacactggacctgccttggcttctttgatcccaaccccacccccgatttctgctctgctgactggggaagtcatcgtgccacccagaacctgagtgcgggcctctcagagctccttcgtccgtgggtctgccggggactgggccttgtctccctggcgagtgccaggtgaggctgcggcggctccgacgcaggtggagctgctgacctggcccctttctgcggctgcgagggactttgaacatgtcggggatcgccctcagcagactcgcccaggagaggaaagcatggaggaaagaccacccatttggtttcgtggctgtcccaacaaaaaatcccgatggcacgatgaacctcatgaactgggagtgcgccattccaggaaagaaagggactccgtgggaaggaggcttgtttaaactacggatgcttttcaaagatgattatccatcttcgccaccaaaatgtaaattcgaaccaccattatttcacccgaatgtgtacccttcggggacagtgtgcctgtccatcttagaggaggacaaggactggaggccagccatcacaatcaaacagatcctattaggaatacaggaacttctaaatgaaccaaatatccaagacccagctcaagcagaggcctacacgatttactgccaaaacagagtggagtacgagaaaagggtccgagcacaagccaagaagtttgcgccctcataagcagcgaccttgtggcatcgtcagaaggaagggattggtttggcaagaacttgtttacaacatttttgcaaatctaaagttgctccatacaatgactagtcacctgggggggttgggcgggcgccatcttccattgccgccgcgggtgtgcggtctcgattcgctgaattgcccgtttccatacagggtctcttccttcggtcttttgtatttttgattgttatgtaaaactcgcttttattttaatattgatgtcagtatttcaactgctgtaaaattataaacttttatacttgggtaagtcccccaggcgagttcctcgctctgggatgcaggcatgcttctcaccgtgcagagctgcacttggcctcagctggctgtatggaaatgcaccctccctcctgcgctcctctctagaacctgggctgtgctgcttttgagcctcagaccccagggcagcatctcggttctgcgccacttcctttgtgtttatatggcgttttgtctgtgttgctgtttaggtaaataaactgtttatataaaaaaaaaaaaaaaaaaaaaaaaaaaaaaaaa

SEQ ID NO: 2731 - protein, 158 aa, Homo sapiens [sequence omitted]

SEQ ID NO: 2732 - DNA, 4394 bp, Homo sapiens
ccggctcggtacgcgctctgctccgagccgctcactgcgtggtagagtctggtgcccccgccgtcgcctgcatcgccgccaccgccgctccgccacgaccaccgccgcctcctgccctgcagccaccgccaccgcctgtgtcgccgccgcctcgggaccggctgtatgattaggccacaatcttcaatgagtaaacatattcctcaattctgtggtgttcttggtcacacatttatggagtttctgaagggcagtggagattactgccaggcacagcacgacctctatgcagacaagtgaactgtagaaactgattactgctccaccaagaagcccccataagagtggttatcctggacacagaagtgttgaattgaaatccacagagcattttacaagagttctgacctggatggggtaaacctcagtgcacttcttttctgttggcctcagtattactggattgaagaattgctgcttcttgttaggaggttcatttcacttatcattacttacaacttcatactcaaagcactgagaatttcaagtggagtatattgaagtagacttcagtttctttgcatcatttctgtattcaatttttttaattatttcataaccctattgagtgttttttaactaaattaacatggctcgaatgaaccgcccagctcctgtggaagtcacatacaagaacatgagatttcttattacacacaatccaaccaatgcgaccttaaacaaatttatagaggaacttaagaagtatggagttaccacaatagtaagagtatgtgaagcaacttatgacactactcttgtggagaaagaaggtatccatgttcttgattggccttttgatgatggtgcaccaccatccaaccagattgttgatgactggttaagtcttgtgaaaattaagtttcgtgaagaacctggttgttgtattgctgttcattgcgttgcaggccttgggagagctccagtacttgttgccctagcattaattgaaggtggaatgaaatacgaagatgcagtacaattcataagacaaaagcggcgtggagcttttaacagcaagcaacttctgtatttggagaagtatcgtcctaaaatgcggctgcgtttcaaagattccaacggtcatagaaacaactgttgcattcaataaaattggggtgcctaatgctactggaagtggaacttgagatagggcctaatttgttatacatattagccaacatgttggcttagtaagtctaatgaagcttccataggagtattgaaaggcagttttaccaggcctcaagctagacagatttggcaacctctgtatttgggttacagtcaacctatttggatacttggcaaaagattcttgctgtcagcatataaaatgtgcttgtcatttgtatcaattgacctttccccaaatcatgcagtattgagttatgacttgttaaatctattcccatgccagaatcttatcaatacataagaaatttaggaagattaggtgccaaaatacccagcacaatacttgtatatttttagtaccatacagaagtaaaatcccaggaactatgaacactagaccttatgtggtttattccttcaatcatttcaaacattgaaagtagggcctacatggttatttgcctgctcactttatgtttacatctcccacattcataccaatatacgtcaggtttgcttaaccattgatttttttttttttttaccaagtcttacagtgattattttacgtgtttccatgtatctcactttgtgctgtattaaaaaaacctccattttgaaaatctacgttgtacagaagcacatgtctttaatgtcttcagacaaaaaagccttacattaatttaatgtttgcactctgaggtgcaacttaacagggagggcctgagaaaagaatgggagggggctattaattattttttagcaaaatgttgcctttgtcttgtgcaaacatgtagaatatgctctttaatttagtaaaatatttttttaaaaggtagagatgctttgttattgtaatcataaacttcctgaaattcttgtaatttttttcccatacttatcagaagtgtgtttaccaacttatttttgtttgaaagtgtgattttttttttccttcccaacctctcttgcaaaaaaagaaatgggtttctgctaatgaattgagcacatctaatattttatatgccttttggagctgtgtaagttaatatttgatacttgacaatttgttttattatgtaattgataaaatggtgatgtgtattaatgttagttcaaccatatatttatactgtctggggatgtgtggttatagttctgtgggagaaataattttgtcagtgttcaccagcttgtaaaaacttagtgcgagagctgaaacatctaaataaataatgacatgcatttatcatcattgagattggtttgctttaaattaacttattttgtagaagacaaaatgaattgcacttcacttaatgtgtgtcctcatctttttacaaataaatgaaggattataaatgatgtcagcattttagtaaacttttagacaaaatttgttagggtcattcatgaaaactttaatactaaaagcactttccattatatactttttaaaggtctagataattttgaaccaatttattattgtgtactgaggagaaataatgtatagtagaggacagccttggtttgtaaagctcagttccactagttcatggttttgtgcaacttctgagcctcagttttctcctttgcaaattaataattacatacctttatagattttgaaattaatttaaatattagtatttggtacatgaaggcttaatgttaagtttcctttaatgatccacaataatccctttgatcacgttaatctaaatctagatgtctttgtctaattttttttgaatagcagttataaatgtaaaggactcaaagtttaagtaaaaagtgatactccaccttgtgtttcaaagaatttagttccacctcttcataccagtttaacacttaatatatttcattggattttagacagggcaaaaggaagaacaggggcctctggaggcccttggttatttaaatcttggattatttgtgatagtaatcacaaatttttggctaatttttaacctgaggttttgttttttttttaaaggaaatgcagcctagtcttgagaacataattttatataatcaattactaaatgttaaactattaccacacagcccataaaacagcatttgcgtttattgagagagaggatgtgccatcatgattaatgaaaactatcttttgagtttgaaaagaaattaatttgcagtgtttggattgtatatatggtgctaaaaataaattaatttactttataaaccttatctgtacattatacgatgtgatgaaatttgctttttatccaaatattttgtatcttgtaaatatggctaattataggaatgcctataatacatcttagattccttatatctaataagagttcaaagagttatgagttgaagtcttgaatgcaggaaactatctgatagtgttctaaaatttggttacttgggtttggatacccttagtgggatgatgtaaatagaggctagctacctaggcttgtctatagcaaccataatgttgatgtaagtaatgcggttactgaatcataagaaaatgccatctctttttagttgaaggaaaactctggaagtaggtgccattggtcattctgcagtgcactgcaaccattgtttcccctagtgccctcttttccctagggcattgctctcctattcccacgccttaacacagctctatacctagaagcagccagcccaggcatgcagtcacatttaatcacatcccccttctagagtgcttcaaaatgatgtagtccctcaacttggctaaagaatctcaatctcttgaaatttatttttttaatgtcatattcatctggtaaatatctactgtttgccaggcatttaagaatatggcaaagaacataaaagatggtgtcaccagattttggtcaccaatgagtacccgacccgttgccatgattaagagagaatgctttctattggagtttcaggaaatataatttgagaatactttaaagggaagtggaagtataagtgaatgatatttttcttttacatgtaaacaatgaagttatttcaaagttaagttttaaacaaaatacatgaagtagtgtctgccatacatgttaatattctacattcttgcttccttaaattaatatgtttgtgtgtatatatgtgcctcacacctgaattgaaaattaaagactggtttaaaagtggttaaaaaaaaaaaaaaaaaa

SEQ ID NO: 2733 - protein, 173 aa, Homo sapiens
MARMNRPAPVEVTYKNMRFLITHNPTNATLNKFIEELKKYGVTTIVRVCEATYDTTLVEKEGIHVLDWPFDDGAPPSNQIVDDWLSLVKIKFREEPGCCIAVHCVAGLGRAPVLVALALIEGGMKYEDAVQFIRQKRRGAFNSKQLLYLEKYRPKMRLRFKDSNGHRNNCCIQ

SEQ ID NO: 2734 - DNA, 2439 bp, Homo sapiens
gcagccgccaccgccgccgccgccgccaccagagccgccctgtccgcgccgcgcctcggcagccggaacagggccgccgtcggggagccccaacacacggtccacagctcatcatgatggacttggagctgccgccgccgggactcccgtcccagcaggacatggatttgattgacatactttggaggcaagatatagatcttggagtaagtcgagaagtatttgacttcagtcagcgacggaaagagtatgagctggaaaaacagaaaaaacttgaaaaggaaagacaagaacaactccaaaaggagcaagagaaagcctttttcgctcagttacaactagatgaagagacaggtgaatttctcccaattcagccagcccagcacatccagtcagaaaccagtggatctgccaactactcccaggttgcccacattcccaaatcagatgctttgtactttgatgactgcatgcagcttttggcgcagacattcccgtttgtagatgacaatgaggtttcttcggctacgtttcagtcacttgttcctgatattcccggtcacatcgagagcccagtcttcattgctactaatcaggctcagtcacctgaaacttctgttgctcaggtagcccctgttgatttagacggtatgcaacaggacattgagcaagtttgggaggagctattatccattcctgagttacagtgtcttaatattgaaaatgacaagctggttgagactaccatggttccaagtccagaagccaaactgacagaagttgacaattatcatttttactcatctataccctcaatggaaaaagaagtaggtaactgtagtccacattttcttaatgcttttgaggattccttcagcagcatcctctccacagaagaccccaaccagttgacagtgaactcattaaattcagatgccacagtcaacacagattttggtgatgaattttattctgctttcatagctgagcccagtatcagcaacagcatgccctcacctgctactttaagccattcactctctgaacttctaaatgggcccattgatgtttctgatctatcactttgcaaagctttcaaccaaaaccaccctgaaagcacagcagaattcaatgattctgactccggcatttcactaaacacaagtcccagtgtggcatcaccagaacactcagtggaatcttccagctatggagacacactacttggcctcagtgattctgaagtggaagagctagatagtgcccctggaagtgtcaaacagaatggtcctaaaacaccagtacattcttctggggatatggtacaacccttgtcaccatctcaggggcagagcactcacgtgcatgatgcccaatgtgagaacacaccagagaaagaattgcctgtaagtcctggtcatcggaaaaccccattcacaaaagacaaacattcaagccgcttggaggctcatctcacaagagatgaacttagggcaaaagctctccatatcccattccctgtagaaaaaatcattaacctccctgttgttgacttcaacgaaatgatgtccaaagagcagttcaatgaagctcaacttgcattaattcgggatatacgtaggaggggtaagaataaagtggctgctcagaattgcagaaaaagaaaactggaaaatatagtagaactagagcaagatttagatcatttgaaagatgaaaaagaaaaattgctcaaagaaaaaggagaaaatgacaaaagccttcacctactgaaaaaacaactcagcaccttatatctcgaagttttcagcatgctacgtgatgaagatggaaaaccttattctcctagtgaatactccctgcagcaaacaagagatggcaatgttttccttgttcccaaaagtaagaagccagatgttaagaaaaactagatttaggaggatttgaccttttctgagctagtttttttgtactattatactaaaagctcctactgtgatgtgaaatgctcatactttataagtaattctatgcaaaatcatagccaaaactagtatagaaaataatacgaaactttaaaaagcattggagtgtcagtatgttgaatcagtagtttcactttaactgtaaacaatttcttaggacaccatttgggctagtttctgtgtaagtgtaaatactacaaaaacttatttatactgttcttatgtcatttgttatattcatagatttatatgatgatatgacatctggctaaaaagaaattattgcaaaactaaccactatgtacttttttataaatactgtatggacaaaaaatggcattttttatattaaattgtttagctctggcaaaaaaaaaaaattttaagagctggtactaataaaggattattatgactgttaaaaaaaaaaaaaaaaaaaaaaaaaaaaaaaaaa

SEQ ID NO: 2735 - protein, 589 aa, Homo sapiens
MDLIDILWRQDIDLGVSREVFDFSQRRKEYELEKQKKLEKERQEQLQKEQEKAFFTQLQLDEETGEFLPIQPAQHTQSETSGSANYSQVAHIPKSDALYFDDCMQLLAQTFPFVDDNEVSSATFQSLVPDIPGHIESPVFIATNQAQSPETSVAQVAPVDLDGMQQDIEQVWEELLSIPELQCLNIENDKLVETTMVPSPEAKLTEVDNYHFYSSIPSMEKEVGNCSPHFLNAFEDSFSSILSTEDPNQLTVNSLNSDATVNTDFGDEFYSAFIAEPSISNSMPSPATLSHSLSELLNGPIDVSDLSLCKAFNQNHPESTAEFNDSDSGISLNTSPSVASPEHSVESSSYGDTLLGLSDSEVEELDSAPGSVKQNGPKTPVHSSGDMVQPLSPSQGQSTHVHDAQCENTPEKELPVSPGHRKTPFTKDKHSSRLEAHLTRDELRAKALHIPFPVEKIINLPVVDFNEMMSKEQFNEAQLALIRDIRRRGKNKVAAQNCRKRKLENIVELEQDLDHLKDEKEKLLKEKGENDKSLHLLKKQLSTLYLEVFSMLRDEDGKPYSPSEYSLQQTRDGNVFLVPKSKKPDVKKN

SEQ ID NO: 2736 - DNA, 762 bp, Homo sapiens
gttcgccgcctctcccaccggcccgatgagctgcagcggctccggcgcggaccccgaggcggcgccggcctccgccgcctcggccccgggccccgcgcccccggtctcggctcccgccgcgctgccctccagcaccgccgcggagaacaaggccagccccgcggggacagcggggggacctggggctggagcagctgctgggggcacgggacccttggcggcgcgggccggggagccagctgagcggcgtggggcggctccggtgtcggcgggtggcgcggcgcccccggagggggccatatctaacggggtttacgtactgccgagcgcggccaacggagacgtgaagcccgtggtgtccagcacgcctttggtggacttcttgatgcagctggaagattacacgcctacgatcccagatgcagtgactggttactacctgaaccgtgctggctttgaggcctcagacccacgcataattcggctcatctccttagctgcccagaaattcatctcagatattgccaatgatgccctacagcactgcaaaatgaagggcacggcctccggcagctcccggagcaagagcaaggaccgcaagtacactctaaccatggaggacttgacccctgccctcagcgagtatggcatcaatgtgaagaagccgcactacttcacctgagccacccaacctaaatgtacttatctgtccccatgtccccacaccagcctgttttcataataaactttattgtgacaggc

SEQ ID NO: 2737 - protein, 218 aa, Homo sapiens
MSCSGSGADPEAAPASAASAPGPAPPVSAPAALPSSTAAENKASPAGTAGGPGAGAAAGGTGPLAARAGEPAERRGAAPVSAGGAAPPEGAISNGVYVLPSAANGDVKPVVSSTPLVDFLMQLEDYTPTIPDAVTGYYLNRAGFEASDPRIIRLISLAAQKFISDIANDALQHCKMKGTASGSSRSKSKDRKYTLTMEDLTPALSEYGINVKKPHYFT

SEQ ID NO: 2738 - DNA, 1578 bp, Homo sapiens
gcgacgcgccgaggtactaggcagagccgtggaaccgccgccaggtcgctgttggtccacgccgcccgtcgcgccgcccgcccgctcagcgtccgccgccgccatgggagtgcaggtggaaaccatctccccaggagacgggcgcaccttccccaagcgcggccagacctgcgtggtgcactacaccgggatgcttgaagatggaaagaaatttgattcctcccgggacagaaacaagccctttaagtttatgctaggcaagcaggaggtgatccgaggctgggaagaaggggttgcccagatgagtgtgggtcagagagccaaactgactatatctccagattatgcctatggtgccactgggcacccaggcatcatcccaccacatgccactctcgtcttcgatgtggagcttctaaaactggaatgacaggaatggcctcctcccttagctccctgttcttggatctgccatggagggatctggtgcctccagacatgtgcacatgagtccatatggagcttttcctgatgttccactccactttgtatagacatctgccctgactgaatgtgttctgtcactcagctttgcttccgacacctctgtttcctcttcccctttctcctcgtatgtgtgtttacctaaactatatgccataaacctcaagttattcattttattttgttttcattttggggtgaagattcagtttcagtcttttggatataggtttccaattaagtacatggtcaagtattaacagcacaagtggtaggttaacattagaataggaattggtgttggggggggggtttgcaagaatattttattttaattttttggatgaaatttttatctattatatattaaacattcttgctgctgcgctgcaaagccatagcagatttgaggcgctgttgaggactgaattactctccaagttgagagatgtctttgggttaaattaaaagccctacctaaaactgaggtggggatggggagagcctttgcctccaccattcccacccaccctccccttaaaccctctgcctttgaaagtagatcatgttcactgcaatgctggacactacaggtatctgtccctgggccagcagggacctctgaagccttctttgtggccttttttttttttcatcctgtggtttttctaatggactttcaggaattttgtaatctcataactttccaagctccaccacttcctaaatcttaagaactttaattgacagtttcaattgaaggtgctgtttgtagacttaacacccagtgaaagcccagccatcatgacaaatccttgaatgttctcttaagaaaatgatgctggtcatcgcagcttcagcatctcctgttttttgatgcttggctccctctgctgatctcagtttcctggcttttcctccctcagccccttctcacccctttgctgtcctgtgtagtgatttggtgagaaatcgttgctgcacccttcccccagcaccatttatgagtctcaagttttattattgcaataaaagtgctttatgccggcttttctcaaaaaaaaaaaaaaaaaa

SEQ ID NO: 2739 - protein, 108 aa, Homo sapiens
MGVQVETISPGDGRTFPKRGQTCVVHYTGMLEDGKKFDSSRDRNKPFKFMLGKQEVIRGWEEGVAQMSVGQRAKLTISPDYAYGATGHPGIIPPHATLVFDVELLKLE

SEQ ID NO: 2740 - DNA, 810 bp, Homo sapiens
gcgacgcgccgaggtactaggcagagccgtggaaccgccgccaggtcgctgttggtccacgccgcccgtcgcgccgcccgcccgctcagcgtccgccgccgccatgggagtgcaggtggaaaccatctccccaggagacgggcgcaccttccccaagcgcggccagacctgcgtggtgcactacaccgggatgcttgaagatggaaagaaatttgattcctcccgggacagaaacaagccctttaagtttatgctaggcaagcaggaggtgatccgaggctgggaagaaggggttgcccagatgagtgtgggtcagagagccaaactgactatatctccagattatgcctatggtgccactgggcacccaggcatcatcccaccacatgccactctcgtcttcgatgtggagcttctaaaactggaatgacaggaatggcctcctcccttagctccctgttcttgggtaaggaaatggaatactgaagggcccttcactgcctttgctcctcccatgttatgcccagcgtttgatgggtagcagagagaacaaaaaacaccacaaggctatttttccccctgcattctttctgtattgagtatcctttcagtgttattagtgtatgctttgaatgtaaaaattggtcaccctaaggaaaggaattggcatgtgtatgttcccagttcaactcatggagatggcagctgtttaaatgtttttctatgtagtttataaattaaaactgaattgaggactatggaaatgtaggccaaatttgtagtgccaacattttagttctttggaaataa

SEQ ID NO: 2741 - DNA, 2592 bp, Homo sapiens
agggcgaacgggcgagtggcagcgaggcggggcgggctgaggccagcgcggaagtctcgcgaggccgggcccgagcagagtgtggcggcggcggcgagatctgggctcgggttgaggagttggtatttgtgtggaaggaggcggaggcgcaggaggaagggggaagcggagcgccggcccggagggcgggaggaggcgcggccagggcgggcggttgcggcgaggcgaggcgaggcggggagccgagacgagcagcggccgagcgagcgcgggcgcgggcgcaccgaggcgagggaggcggggaagccccgccgccgccgcggcgcccgccccttcccccgccgcccgccccctctccccccgcccgctcgccgccttcctccctctgccttccttccccacggccggccgcctcctcgcccgcccgcccgcagccgaggagccgaggccgccgcggccgtggcggcggagccctcagccatggcctcgggcgacaccctctacatcgccacggacggctcggagatgccggccgagatcgtggagctgcacgagatcgaggtggagaccatcccggtggagaccatcgagaccacagtggtgggcgaggaggaggaggaggacgacgacgacgaggacggcggcggtggcgaccacggcggcgggggcggccacgggcacgccggccaccaccaccaccaccatcaccaccaccaccacccgcccatgatcgctctgcagccgctggtcaccgacgacccgacccaggtgcaccaccaccaggaggtgatcctggtgcagacgcgcgaggaggtggtgggcggcgacgactcggacgggctgcgcgccgaggacggcttcgaggatcagattctcatcccggtgcccgcgccggccggcggcgacgacgactacattgaacaaacgctggtcaccgtggcggcggccggcaagagcggcggcggcggctcgtcgtcgtcgggaggcggccgcgtcaagaagggcggcggcaagaagagcggcaagaagagttacctcagcggcggggccggcgcggcgggcggcggcggcgccgacccgggcaacaagaagtgggagcagaagcaggtgcagatcaagaccctggagggcgagttctcggtcaccatgtggtcctcagatgaaaaaaaagatattgaccatgagacagtggttgaagaacagatcattggagagaactcacctcctgattattcagaatatatgacaggaaagaaacttcctcctggaggaatacctggcattgacctctcagatcccaaacaactggcagaatttgctagaatgaagccaagaaaaattaaagaagatgatgctccaagaacaatagcttgccctcataaaggctgcacaaagatgttcagggataactcggccatgagaaaacatctgcacacccacggtcccagagtccacgtctgtgcagaatgtggcaaagcttttgttgagagttcaaaactaaaacgacaccaactggttcatactggagagaagccctttcagtgcacgttcgaaggctgtgggaaacgcttttcactggacttcaatttgcgcacacatgtgcgaatccataccggagacaggccctatgtgtgccccttcgatggttgtaataagaagtttgctcagtcaactaacctgaaatctcacatcttaacacatgctaaggccaaaaacaaccagtgaaaagaagagagaagacccttctcgaccacgggaagcatcttccagaagtgtgattgggaataaatatgcctctcctttgtatattatttctaggaagaattttaaaaatgaatcctacacacctaagggacatgttttgataaagtagtaaaaattaaaaaaaaaaaactttactaagatgacattgctaagatgctctatcttgctctgtaatctcgtttcaaaaacacagtgtttttgtaaagtgtggtcccaacaggaggacaattcatgaacttcgcatcaaaagacaattctttatacaacagtgctaaaaatgggacttcttttcacattcttataaatatgaagctcacctgttgcttacaatttttttaattttgtattttccaagtgtgcatattgtacacttttttggggatatgcttagtaatgctacgtgtgatttttctggaggttgataactttgcttgcagtagattttctttaaaagaatgggcagttacatgcatacttcaaaagtattttcctgtaaaaaaaaaaaagttatataggttttgtttgctatcttaattttggttgtattctttgatgttaacacattttgtataattgtatcgtatagctgtattgaatcatgtagtatcaaatattagatgtgatttaatagtgttaatcaatttaaacccattttagtcactttttttttccaaaaaaatactgccagatgctgatgttcagtgtaatttctttgcctgttcagttacagaaagtggtgctcagttgtagaatgtattgtaccttttaacacctgatgtgtacatcccatgtaacagaaagggcaacaataaaatagcaatcctaaag

SEQ ID NO: 2742 - protein, 414 aa, Homo sapiens
MASGDTLYIATDGSEMPAEIVELHEIEVETIPVETIETTVVGEEEEEDDDDEDGGGGDHGGGGGHGHAGHHHHHHHHHHHPPMIALQPLVTDDPTQVHHHQEVILVQTREEVVGGDDSDGLRAEDGFEDQILIPVPAPAGGDDDYIEQTLVTVAAAGKSGGGGSSSSGGGRVKKGGGKKSGKKSYLSGGAGAAGGGGADPGNKKWEQKQVQIKTLEGEFSVTMWSSDEKKDIDHETVVEEQIIGENSPPDYSEYMTGKKLPPGGIPGIDLSDPKQLAEFARMKPRKIKEDDAPRTIACPHKGCTKMFRDNSAMRKHLHTHGPRVHVCAECGKAFVESSKLKRHQLVHTGEKPFQCTFEGCGKRFSLDFNLRTHVRIHTGDRPYVCPFDGCNKKFAQSTNLKSHILTHAKAKNNQ

SEQ ID NO: 2743 - DNA, 561 bp, Homo sapiens
accacagtggtgtccgagaagtcaggcacgtagctcagcggcggccgcggcgcgtgcgtctgtgcctctgcgcgggtctcctggtccttctgccatcatgccgatgttcatcgtaaacaccaacgtgccccgcgcctccgtgccggacgggttcctctccgagctcacccagcagctggcgcaggccaccggcaagcccccccagtacatcgcggtgcacgtggtcccggaccagctcatggccttcggcggctccagcgagccgtgcgcgctctgcagcctgcacagcatcggcaagatcggcggcgcgcagaaccgctcctacagcaagctgctgtgcggcctgctggccgagcgcctgcgcatcagcccggacagggtctacatcaactattacgacatgaacgcggccaatgtgggctggaacaactccaccttcgcctaagagccgcagggacccacgctgtctgcgctggctccacccgggaacccgccgcacgctgtgttctaggcccgcccaccccaaccttctggtggggagaaataaacggtttagagact

SEQ ID NO: 2744 - protein, 115 aa, Homo sapiens
MPMFIVNTNVPRASVPDGFLSELTQQLAQATGKPPQYIAVHVVPDQLMAFGGSSEPCALCSLHSIGKIGGAQNRSYSKLLCGLLAERLRISPDRVYINYYDMNAANVGWNNSTFA

SEQ ID NO: 2745 - DNA, 14136 bp, Homo sapiens
gcactgcagcgccagcgtccgagcgggcggccgagctcccggagcggcctggccccgagccccgagcgggcgtcgctcagcagcaggtcgcggccgcgcagccccatccagccccgcgcccgccatgccgtccgcgggccccgcctgagctgcggtctccgcgcgcgggcgggcctggggacggcggggccatgcgcgcgctgccctaacgatgccgcccgccgcgcccgcccgcctggcgctggccctgggcctgggcctgtggctcggggcgctggcggggggccccgggcgcggctgcgggccctgcgagcccccctgcctctgcggcccagcgcccggcgccgcctgccgcgtcaactgctcgggccgcgggctgcggacgctcggtcccgcgctgcgcatccccgcggacgccacagcgctagacgtctcccacaacctgctccgggcgctggacgttgggctcctggcgaacctctcggcgctggcagagctggatataagcaacaacaagatttctacgttagaagaaggaatatttgctaatttatttaatttaagtgaaataaacctgagtgggaacccgtttgagtgtgactgtggcctggcgtggctgccgcgatgggcggaggagcagcaggtgcgggtggtgcagcccgaggcagccacgtgtgctgggcctggctccctggctggccagcctctgcttggcatccccttgctggacagtggctgtggtgaggagtatgtcgcctgcctccctgacaacagctcaggcaccgtggcagcagtgtccttttcagctgcccacgaaggcctgcttcagccagaggcctgcagcgccttctgcttctccaccggccagggcctcgcagccctctcggagcagggctggtgcctgtgtggggcggcccagccctccagtgcctcctttgcctgcctgtccctctgctccggccccccgccacctcctgcccccacctgtaggggccccaccctcctccagcacgtcttccctgcctccccaggggccaccctggtggggccccacggacctctggcctctggccagctagcagccttccacatcgctgccccgctccctgtcactgccacacgctgggacttcggagacggctccgccgaggtggatgccgctgggccggctgcctcgcatcgctatgtgctgcctgggcgctatcacgtgacggccgtgctggccctgggggccggctcagccctgctggggacagacgtgcaggtggaagcggcacctgccgccctggagctcgtgtgcccgtcctcggtgcagagtgacgagagccttgacctcagcatccagaaccgcggtggttcaggcctggaggccgcctacagcatcgtggccctgggcgaggagccggcccgagcggtgcacccgctctgcccctcggacacggagatcttccctggcaacgggcactgctaccgcctggtggtggagaaggcggcctggctgcaggcgcaggagcagtgtcaggcctgggccggggccgccctggcaatggtggacagtcccgccgtgcagcgcttcctggtctcccgggtcaccaggagcctagacgtgtggatcggcttctcgactgtgcagggggtggaggtgggcccagcgccgcagggcgaggccttcagcctggagagctgccagaactggctgcccggggagccacacccagccacagccgagcactgcgtccggctcgggcccaccgggtggtgtaacaccgacctgtgctcagcgccgcacagctacgtctgcgagctgcagcccggaggcccagtgcaggatgccgagaacctcctcgtgggagcgcccagtggggacctgcagggacccctgacgcctctggcacagcaggacggcctctcagccccgcacgagcccgtggaggtcatggtattcccgggcctgcgtctgagccgtgaagccttcctcaccacggccgaatttgggacccaggagctccggcggcccgcccagctgcggctgcaggtgtaccggctcctcagcacagcagggaccccggagaacggcagcgagcctgagagcaggtccccggacaacaggacccagctggcccccgcgtgcatgccagggggacgctggtgccctggagccaacatctgcttgccgctggacgcctcttgccacccccaggcctgcgccaatggctgcacgtcagggccagggctacccggggccccctatgcgctatggagagagttcctcttctccgttgccgcggggccccccgcgcagtactcggtcaccctccacggccaggatgtcctcatgctccctggtgacctcgttggcttgcagcacgacgctggccctggcgccctcctgcactgctcgccggctcccggccaccctggtccccaggccccgtacctctccgccaacgcctcgtcatggctgccccacttgccagcccagctggagggcacttgggcctgccctgcctgtgccctgcggctgcttgcagccacggaacagctcaccgtgctgctgggcttgaggcccaaccctggactgcggatgcctgggcgctatgaggtccgggcagaggtgggcaatggcgtgtccaggcacaacctctcctgcagctttgacgtggtctccccagtggctgggctgcgggtcatctaccctgccccccgcgacggccgcctctacgtgcccaccaacggctcagccttggtgctccaggtggactctggtgccaacgccacggccacggctcgctggcctgggggcagtgtcagcgcccgctttgagaatgtctgccctgccctggtggccaccttcgtgcccggctgcccctgggagaccaacgataccctgttctcagtggtagcactgccgtggctcagtgagggggagcacgtggtggacgtggtggtggaaaacagcgccagccgggccaacctcagcctgcgggtgacggcggaggagcccatctgtggcctccgcgccacgcccagccccgaggcccgtgtactgcagggagtcctagtgaggtacagccccgtggtggaggccggctcggacatggtcttccggtggaccatcaacgacaagcagtccctgaccttccagaacgtggtcttcaatgtcatttatcagagcgcggcggtcttcaagctctcactgacggcctccaaccacgtgagcaacgtcaccgtgaactacaacgtaaccgtggagcggatgaacaggatgcagggtctgcaggtctccacagtgccggccgtgctgtcccccaatgccacgctagcactgacggcgggcgtgctggtggactcggccgtggaggtggccttcctgtggaactttggggatggggagcaggccctccaccagttccagcctccgtacaacgagtccttcccggttccagacccctcggtggcccaggtgctggtggagcacaatgtcatgcacacctacgctgccccaggtgagtacctcctgaccgtgctggcatctaatgccttcgagaacctgacgcagcaggtgcctgtgagcgtgcgcgcctccctgccctccgtggctgtgggtgtgagtgacggcgtcctggtggccggccggcccgtcaccttctacccgcacccgctgccctcgcctgggggtgttctttacacgtgggacttcggggacggctcccctgtcctgacccagagccagccggctgccaaccacacctatgcctcgaggggcacctaccacgtgcgcctggaggtcaacaacacggtgagcggtgcggcggcccaggcggatgtgcgcgtctttgaggagctccgcggactcagcgtggacatgagcctggccgtggagcagggcgcccccgtggtggtcagcgccgcggtgcagacgggcgacaacatcacgtggaccttcgacatgggggacggcaccgtgctgtcgggcccggaggcaacagtggagcatgtgtacctgcgggcacagaactgcacagtgaccgtgggtgcggccagccccgccggccacctggcccggagcctgcacgtgctggtcttcgtcctggaggtgctgcgcgttgaacccgccgcctgcatccccacgcagcctgacgcgcggctcacggcctacgtcaccgggaacccggcccactacctcttcgactggaccttcggggatggctcctccaacacgaccgtgcgggggtgcccgacggtgacacacaacttcacgcggagcggcacgttccccctggcgctggtgctgtccagccgcgtgaacagggcgcattacttcaccagcatctgcgtggagccagaggtgggcaacgtcaccctgcagccagagaggcagtttgtgcagctcggggacgaggcctggctggtggcatgtgcctggcccccgttcccctaccgctacacctgggactttggcaccgaggaagccgcccccacccgtgccaggggccctgaggtgacgttcatctaccgagacccaggctcctatcttgtgacagtcaccgcgtccaacaacatctctgctgccaatgactcagccctggtggaggtgcaggagcccgtgctggtcaccagcatcaaggtcaatggctcccttgggctggagctgcagcagccgtacctgttctctgctgtgggccgtgggcgccccgccagctacctgtgggatctgggggacggtgggtggctcgagggtccggaggtcacccacgcttacaacagcacaggtgacttcaccgttagggtggccggctggaatgaggtgagccgcagcgaggcctggctcaatgtgacggtgaagcggcgcgtgcgggggctcgtcgtcaatgcaagccgcacggtggtgcccctgaatgggagcgtgagcttcagcacgtcgctggaggccggcagtgatgtgcgctattcctgggtgctctgtgaccgctgcacgcccatccctgggggtcctaccatctcttacaccttccgctccgtgggcaccttcaatatcatcgtcacggctgagaacgaggtgggctccgcccaggacagcatcttcgtctatgtcctgcagctcatagaggggctgcaggtggtgggcggtggccgctacttccccaccaaccacacggtacagctgcaggccgtggttagggatggcaccaacgtctcctacagctggactgcctggagggacaggggcccggccctggccggcagcggcaaaggcttctcgctcaccgtgctcgaggccggcacctaccatgtgcagctgcgggccaccaacatgctgggcagcgcctgggccgactgcaccatggacttcgtggagcctgtggggtggctgatggtgaccgcctccccgaacccagctgccgtcaacacaagcgtcaccctcagtgccgagctggctggtggcagtggtgtcgtatacacttggtccttggaggaggggctgagctgggagacctccgagccatttaccacccatagcttccccacacccggcctgcacttggtcaccatgacggcagggaacccgctgggctcagccaacgccaccgtggaagtggatgtgcaggtgcctgtgagtggcctcagcatcagggccagcgagcccggaggcagcttcgtggcggccgggtcctctgtgcccttttgggggcagctggccacgggcaccaatgtgagctggtgctgggctgtgcccggcggcagcagcaagcgtggccctcatgtcaccatggtcttcccggatgctggcaccttctccatccggctcaatgcctccaacgcagtcagctgggtctcagccacgtacaacctcacggcggaggagcccatcgtgggcctggtgctgtgggccagcagcaaggtggtggcgcccgggcagctggtccattttcagatcctgctggctgccggctcagctgtcaccttccgcctgcaggtcggcggggccaaccccgaggtgctccccgggccccgtttctcccacagcttcccccgcgtcggagaccacgtggtgagcgtgcggggcaaaaaccacgtgagctgggcccaggcgcaggtgcgcatcgtggtgctggaggccgtgagtgggctgcagatgcccaactgctgcgagcctggcatcgccacgggcactgagaggaacttcacagcccgcgtgcagcgcggctctcgggtcgcctacgcctggtacttctcgctgcagaaggtccagggcgactcgctggtcatcctgtcgggccgcgacgtcacctacacgcccgtggccgcggggctgttggagatccaggtgcgcgccttcaacgccctgggcagtgagaaccgcacgctggtgctggaggttcaggacgccgtccagtatgtggccctgcagagcggcccctgcttcaccaaccgctcggcgcagtttgaggccgccaccagccccagcccccggcgtgtggcctaccactgggactttggggatgggtcgccagggcaggacacagatgagcccagggccgagcactcctacctgaggcctggggactaccgcgtgcaggtgaacgcctccaacctggtgagcttcttcgtggcgcaggccacggtgaccgtccaggtgctggcctgccgggagccggaggtggacgtggtcctgcccctgcaggtgctgatgcggcgatcacagcgcaactacttggaggcccacgttgacctgcgcgactgcgtcacctaccagactgagtaccgctgggaggtgtatcgcaccgccagctgccagcggccggggcgcccagcgcgtgtggccctgcccggcgtggacgtgagccggcctcggctggtgctgccgcggctggcgctgcctgtggggcactactgctttgtgtttgtcgtgtcatttggggacacgccactgacacagagcatccaggccaatgtgacggtggcccccgagcgcctggtgcccatcattgagggtggctcataccgcgtgtggtcagacacacgggacctggtgctggatgggagcgagtcctacgaccccaacctggaggacggcgaccagacgccgctcagtttccactgggcctgtgtggcttcgacacagagggaggctggcgggtgtgcgctgaactttgggccccgcgggagcagcacggtcaccattccacgggagcggctggcggctggcgtggagtacaccttcagcctgaccgtgtggaaggccggccgcaaggaggaggccaccaaccagacggtgctgatccggagtggccgggtgcccattgtgtccttggagtgtgtgtcctgcaaggcacaggccgtgtacgaagtgagccgcagctcctacgtgtacttggagggccgctgcctcaattgcagcagcggctccaagcgagggcggtgggctgcacgtacgttcagcaacaagacgctggtgctggatgagaccaccacatccacgggcagtgcaggcatgcgactggtgctgcggcggggcgtgctgcgggacggcgagggatacaccttcacgctcacggtgctgggccgctctggcgaggaggagggctgcgcctccatccgcctgtcccccaaccgcccgccgctggggggctcttgccgcctcttcccactgggcgctgtgcacgccctcaccaccaaggtgcacttcgaatgcacgggctggcatgacgcggaggatgctggcgccccgctggtgtacgccctgctgctgcggcgctgtcgccagggccactgcgaggagttctgtgtctacaagggcagcctctccagctacggagccgtgctgcccccgggtttcaggccacacttcgaggtgggcctggccgtggtggtgcaggaccagctgggagccgctgtggtcgccctcaacaggtctttggccatcaccctcccagagcccaacggcagcgcaacggggctcacagtctggctgcacgggctcaccgctagtgtgctcccagggctgctgcggcaggccgatccccagcacgtcatcgagtactcgttggccctggtcaccgtgctgaacgagtacgagcgggccctggacgtggcggcagagcccaagcacgagcggcagcaccgagcccagatacgcaagaacatcacggagactctggtgtccctgagggtccacactgtggatgacatccagcagatcgctgctgcgctggcccagtgcatggggcccagcagggagctcgtatgccgctcgtgcctgaagcagacgctgcacaagctggaggccatgatgctcatcctgcaggcagagaccaccgcgggcaccgtgacgcccaccgccatcggagacagcatcctcaacatcacaggagacctcatccacctggccagctcggacgtgcgggcaccacagccctcagagctgggagccgagtcaccatctcggatggtggcgtcccaggcctacaacctgacctctgccctcatgcgcatcctcatgcgctcccgcgtgctcaacgaggagcccctgacgctggcgggcgaggagatcgtggcccagggcaagcgctcggacccgcggagcctgctgtgctatggcggcgccccagggcctggctgccacttctccatccccgaggctttcagcggggccctggccaacctcagtgacgtggtgcagctcatctttctggtggactccaatccctttccctttggctatatcagcaactacaccgtctccaccaaggtggcctcgatggcattccagacacaggccggcgcccagatccccatcgagcggctggcctcagagcgcgccatcaccgtgaaggtgcccaacaactcggactgggctgcccggggccaccgcagctccgccaactccgccaactccgttgtggtccagccccaggcctccgtcggtgctgtggtcaccctggacagcagcaaccctgcggccgggctgcatctgcagctcaactatacgctgctggacggccactacctgtctgaggaacctgagccctacctggcagtctacctacactcggagccccggcccaatgagcacaactgctcggctagcaggaggatccgcccagagtcactccagggtgctgaccaccggccctacaccttcttcatttccccggggagcagagacccagcggggagttaccatctgaacctctccagccacttccgctggtcggcgctgcaggtgtccgtgggcctgtacacgtccctgtgccagtacttcagcgaggaggacatggtgtggcggacagaggggctgctgcccctggaggagacctcgccccgccaggccgtctgcctcacccgccacctcaccgccttcggcgccagcctcttcgtgcccccaagccatgtccgctttgtgtttcctgagccgacagcggatgtaaactacatcgtcatgctgacatgtgctgtgtgcctggtgacctacatggtcatggccgccatcctgcacaagctggaccagttggatgccagccggggccgcgccatccctttctgtgggcagcggggccgcttcaagtacgagatcctcgtcaagacaggctggggccggggctcaggtaccacggcccacgtgggcatcatgctgtatggggtggacagccggagcggccaccggcacctggacggcgacagagccttccaccgcaacagcctggacatcttccggatcgccaccccgcacagcctgggtagcgtgtggaagatccgagtgtggcacgacaacaaagggctcagccctgcctggttcctgcagcacgtcatcgtcagggacctgcagacggcacgcagcgccttcttcctggtcaatgactggctttcggtggagacggaggccaacgggggcctggtggagaaggaggtgctggccgcgagcgacgcagcccttttgcgcttccggcgcctgctggtggctgagctgcagcgtggcttctttgacaagcacatctggctctccatatgggaccggccgcctcgtagccgtttcactcgcatccagagggccacctgctgcgttctcctcatctgcctcttcctgggcgccaacgccgtgtggtacggggctgttggcgactctgcctacagcacggggcatgtgtccaggctgagcccgctgagcgtcgacacagtcgctgttggcctggtgtccagcgtggttgtctatcccgtctacctggccatcctttttctcttccggatgtcccggagcaaggtggctgggagcccgagccccacacctgccgggcagcaggtgctggacatcgacagctgcctggactcgtccgtgctggacagctccttcctcacgttctcaggcctccacgctgaggcctttgttggacagatgaagagtgacttgtttctggatgattctaagagtctggtgtgctggccctccggcgagggaacgctcagttggccggacctgctcagtgacccgtccattgtgggtagcaatctgcggcagctggcacggggccaggcgggccatgggctgggcccagaggaggacggcttctccctggccagcccctactcgcctgccaaatccttctcagcatcagatgaagacctgatccagcaggtccttgccgagggggtcagcagcccagcccctacccaagacacccacatggaaacggacctgctcagcagcctgtccagcactcctggggagaagacagagacgctggcgctgcagaggctgggggagctggggccacccagcccaggcctgaactgggaacagccccaggcagcgaggctgtccaggacaggactggtggagggtctgcggaagcgcctgctgccggcctggtgtgcctccctggcccacgggctcagcctgctcctggtggctgtggctgtggctgtctcagggtgggtgggtgcgagcttccccccgggcgtgagtgttgcgtggctcctgtccagcagcgccagcttcctggcctcattcctcggctgggagccactgaaggtcttgctggaagccctgtacttctcactggtggccaagcggctgcacccggatgaagatgacaccctggtagagagcccggctgtgacgcctgtgagcgcacgtgtgccccgcgtacggccaccccacggctttgcactcttcctggccaaggaagaagcccgcaaggtcaagaggctacatggcatgctgcggagcctcctggtgtacatgctttttctgctggtgaccctgctggccagctatggggatgcctcatgccatgggcacgcctaccgtctgcaaagcgccatcaagcaggagctgcacagccgggccttcctggccatcacgcggtctgaggagctctggccatggatggcccacgtgctgctgccctacgtccacgggaaccagtccagcccagagctggggcccccacggctgcggcaggtgcggctgcaggaagcactctacccagaccctcccggccccagggtccacacgtgctcggccgcaggaggcttcagcaccagcgattacgacgttggctgggagagtcctcacaatggctcggggacgtgggcctattcagcgccggatctgctgggggcatggtcctggggctcctgtgccgtgtatgacagcgggggctacgtgcaggagctgggcctgagcctggaggagagccgcgaccggctgcgcttcctgcagctgcacaactggctggacaacaggagccgcgctgtgttcctggagctcacgcgctacagcccggccgtggggctgcacgccgccgtcacgctgcgcctcgagttcccggcggccggccgcgccctggccgccctcagcgtccgcccctttgcgctgcgccgcctcagcgcgggcctctcgctgcctctgctcacctcggtgtgcctgctgctgttcgccgtgcacttcgccgtggccgaggcccgtacttggcacagggaagggcgctggcgcgtgctgcggctcggagcctgggcgcggtggctgctggtggcgctgacggcggccacggcactggtacgcctcgcccagctgggtgccgctgaccgccagtggacccgtttcgtgcgcggccgcccgcgccgcttcactagcttcgaccaggtggcgcagctgagctccgcagcccgtggcctggcggcctcgctgctcttcctgcttttggtcaaggctgcccagcagctacgcttcgtgcgccagtggtccgtctttggcaagacattatgccgagctctgccagagctcctgggggtcaccttgggcctggtggtgctcggggtagcctacgcccagctggccatcctgctcgtgtcttcctgtgtggactccctctggagcgtggcccaggccctgttggtgctgtgccctgggactgggctctctaccctgtgtcctgccgagtcctggcacctgtcacccctgctgtgtgtggggctctgggcactgcggctgtggggcgccctacggctgggggctgttattctccgctggcgctaccacgccttgcgtggagagctgtaccggccggcctgggagccccaggactacgagatggtggagttgttcctgcgcaggctgcgcctctggatgggcctcagcaaggtcaaggagttccgccacaaagtccgctttgaagggatggagccgctgccctctcgctcctccaggggctccaaggtatccccggatgtgcccccacccagcgctggctccgatgcctcgcacccctccacctcctccagccagctggatgggctgagcgtgagcctgggccggctggggacaaggtgtgagcctgagccctcccgcctccaagccgtgttcgaggccctgctcacccagtttgaccgactcaaccaggccacagaggacgtctaccagctggagcagcagctgcacagcctgcaaggccgcaggagcagccgggcgcccgccggatcttcccgtggcccatccccgggcctgcggccagcactgcccagccgccttgcccgggccagtcggggtgtggacctggccactggccccagcaggacaccccttcgggccaagaacaaggtccaccccagcagcacttagtcctccttcctggcgggggtgggccgtggagtcggagtggacaccgctcagtattactttctgccgctgtcaaggccgagggccaggcagaatggctgcacgtaggttccccagagagcaggcaggggcatctgtctgtctgtgggcttcagcactttaaagaggctgtgtggccaaccaggacccagggtcccctccccagctcccttgggaaggacacagcagtattggacggtttctagcctctgagatgctaatttatttccccgagtcctcaggtacagcgggctgtgcccggccccaccccctgggcagatgtcccccactgctaaggctgctggcttcagggagggttagcctgcaccgccgccaccctgcccctaagttattacctctccagttcctaccgtactccctgcaccgtctcactgtgtgtctcgtgtcagtaatttatatggtgttaaaatgtgtatatttttgtatgtcactattttcactagggctgaggggcctgcgcccagagctggcctcccccaacacctgctgcgcttggtaggtgtggtggcgttatggcagcccggctgctgcttggatgcgagcttggccttgggccggtgctgggggcacagctgtctgccaggcactctcatcaccccagaggccttgtcatcctcccttgccccaggccaggtagcaagagagcagcgcccaggcctgctggcatcaggtctgggcaagtagcaggactaggcatgtcagaggaccccagggtggttagaggaaaagactcctcctgggggctggctcccagggtggaggaaggtgactgtgtgtgtgtgtgtgtgcgcgcgcgacgcgcgagtgtgctgtatggcccaggcagcctcaaggccctcggagctggctgtgcctgcttctgtgtaccacttctgtgggcatggccgcttctagagcctcgacacccccccaacccccgcaccaagcagacaaagtcaataaaagagctgtctgactgc

SEQ ID NO: 2746 - protein, 4302 aa, Homo sapiens [sequence omitted]

SEQ ID NO: 2747 - DNA, 3145 bp, Homo sapiens
cgcagagggccggggctacggggcagcgccccgggcgatgaggggccggcgttgaccgggaagagcgggcaccgcggcagtggctccgaggggacccgcgatggcagcgccctgagaggaggctccaggcagggcgggctgcgctggcagcggccgctgaggtgctggccggccggctggctggcgacgggggcagaagcgacgagaggcgcgctcggcacccgcacccccgtgcccccgcctcagttgtctaaacttcgggctctcttccacccgctctgcgcgcccagagtcaacaacttcttcacccccctccgcccccgcccttccctccgtcagccccgggagctcgccgcgcgccggggaccaggaacctccagcgctgagatgtggccgtgaggcgttggcgggcggcgaggagaagctcggcggcgtcccggggccggagggccgtggggccggggcgcaggggcgcgagcaccccgcgcctctcccccgcctcctcctgccgtctccgccgctgcccgtgccttgcaagcagcagccggagctgccaagcgtcagggccgcggagatgtcgtcgtcgtcgccgccggcgggggctgccagcgccgccatctcggcctcggagaaagtggacggcttcacccggaaatcggtccgcaaggcgcagaggcagaagcgctcccagggctcgtcgcagtttcgcagccagggcagccaggcagagctgcacccgctgccccagctcaaagatgccacttcaaatgaacaacaagagcttttctgtcagaagttgcagcagtgttgtatactgtttgatttcatggactctgtttcagacttgaagagcaaagaaattaaaagagcaacactgaatgaactggttgagtatgtttcaactaatcgtggtgtaattgttgaatcagcgtattctgatatagtaaaaatgatcagtgctaacatcttccgtacacttcctccaagtgataatccagattttgatccagaagaggatgaacccacgcttgaggcctcttggcctcacatacagttggtatatgaattcttcttgagatttttggagagccctgatttccagcctagcattgcaaaacgatacattgatcagaaattcgtacaacagctcctggagctttttgatagtgaagatcccagagaacgtgacttcctgaagactgttctgcaccgaatttatgggaaatttcttggattaagagcattcatcagaaaacaaattaacaacattttcctcaggtttatatatgaaacagaacatttcaatggtgttgctgaacttcttgaaatattaggaagtattatcaatggctttgcattgccactgaaagcagaacataaacaatttctaatgaaggttcttattcctatgcatactgcaaaaggattagctttgtttcatgctcagctagcatattgtgttgtacagttcctggagaaagatacaacactaacagagccagtgatcagaggactgctgaaattttggccaaaaacctgcagtcagaaagaggtgatgtttttaggagaaattgaagaaatcttagatgtcattgaaccaacacagttcaaaaaaattgaagagccacttttcaagcagatatccaagtgtgtatccagttctcattttcaggttgcagaaagggcattgtacttctggaataacgaatatattcttagtttgattgaggagaacattgataaaattctgccaattatgtttgccagtttgtacaaaatttccaaagaacactggaatccgaccattgtagcactggtatacaatgtgctgaaaaccctaatggaaatgaatggcaagcttttcgatgaccttactagctcatacaaagctgaaagacagagagagaaaaagaaggaattggaacgtgaagaattatggaaaaaattagaggagctaaagctaaagaaagctctagaaaaacagaatagtgcttacaacatgcacagtattctcagcaatacaagtgccgaataaaaaaaaagcctcccacctctgccggataggcagagttttgtatgcttttttgaaatatgtaaaaattacaaaacaaacctcatcagtataatataattaaaaggccaattttttctggcaactgtaaatggaaaaatatatggactaaacgtagccctgtgctgtatcatggccatagtatattgtaacctttgtctaatcattggatttattgtgtcacttctgaagtttcacagaaatgaatgaattttatcatctatgatatgagtgagataattatgggagtggtaagaattatgacttgaattcttctttgattgtgttgcacatagatatggtagtctgctctgtatatttttcccttttataatgtgcttttcacactgctgcaaaccttagttacatcctaggaaaaaatacttcctaaaataaaactaaggtatcatccttacccttctctttgtctcacccagaaatatgatggggggaattacctgccctaacccctccctcaataaatacattactgtactctggaatttaggcaaaaccttaaatctccaggctttttaaagcacaaaatataaataaaagctgggaaagtaaaccaaaattcttcagattgttcctcatgaatatcccccttcctctgcaattctccagagtggtaacagatgggtagaggcagctcaggtgaattacccagcttgcctctcaattcattcctcctcttcctctcaaaggctgaaggcagggcctttccagtcctcacaacctgtccttcacctagtccctcctgacccagggatggaggctttgagtcccacagtgtggtgatacagagcactagttgtcactgcctggctttatttaaaggaactgcagtaggcttcctctgtagagctctgaaaaggttgactatatagaggtcttgtatgtttttacttggtcaagtatttctcacatcttttgttatcagagtaccattccaatctcttaacttgcagttgtgtggaaaactgttttgtaatgaaagatcttcattgggggattgagcagcatttaataaagtctatgtttgtattttgccttaaaaaaaaaaaaaaaaaa

SEQ ID NO: 2748 - protein, 486 aa, Homo sapiens
MSSSSPPAGAASAAISASEKVDGFTRKSVRKAQRQKRSQGSSQFRSQGSQAELHPLPQLKDATSNEQQELFCQKLQQCCILFDFMDSVSDLKSKEIKRATLNELVEYVSTNRGVIVESAYSDIVKMISANIFRTLPPSDNPDFDPEEDEPTLEASWPHIQLVYEFFLRFLESPDFQPSIAKRYIDQKFVQQLLELFDSEDPRERDFLKTVLHRIYGKFLGLRAFIRKQINNIFLRFIYETEHFNGVAELLEILGSIINGFALPLKAEHKQFLMKVLIPMHTAKGLALFHAQLAYCVVQFLEKDTTLTEPVIRGLLKFWPKTCSQKEVMFLGEIEEILDVIEPTQFKKIEEPLFKQISKCVSSSHFQVAERALYFWNNEYILSLIEENIDKILPIMFASLYKISKEHWNPTIVALVYNVLKTLMEMNGKLFDDLTSSYKAERQREKKKELEREELWKKLEELKLKKALEKQNSAYNMHSILSNTSAE

SEQ ID NO: 2749 - DNA, 474 bp, Homo sapiens
atgcagctgacggtgaaggcgctgcagggccgcgagtgcagcctgcaggtgccagaggacgagctggtgtccacgctgaagcagctggtctccgagaagctgaacgtcccagtgcgccagcagcggctgctgttcaagggcaaggccctggcagatgggaaacgactctcggattatagcatcgggcccaactccaagctcaacctagtggtcaaacccctggagaaggtgctactagaagaaggcgaggcccagaggctggccgactccccacccccgcaggtctggcagctgatctccaaagtcttggcccgccacttcagtgcggcagatgccagcagggtcctggaacagctacagagggattacgagaggtccctgagtcgcctgacgctggacgacatcgaacggttggccagccgcttcctgcaccctgaagtgactgagacaatggagaagggcttctccaaatag

SEQ ID NO: 2750 - protein, 157 aa, Homo sapiens
MQLTVKALQGRECSLQVPEDELVSTLKQLVSEKLNVPVRQQRLLFKGKALADGKRLSDYSIGPNSKLNLVVKPLEKVLLEEGEAQRLADSPPPQVWQLISKVLARHFSAADASRVLEQLQRDYERSLSRLTLDDIERLASRFLHPEVTETMEKGFSK

SEQ ID NO: 2751 - DNA, 1541 bp, Homo sapiens
ccgagccccagcccggccgccatggacgacaaggcgttcaccaaggagctggaccagtgggtcgagcagctgaacgagtgtaagcagctgaacgagaaccaagtgcggacgctgtgcgagaaggcaaaggaaattttaacaaaagaatcaaatgtgcaagaggttcgttgccctgttactgtctgtggagatgtgcatggtcaatttcatgatcttatggaactctttagaattggtggaaaatcaccggatacaaactacttattcatgggtgactatgtagacagaggatattattcagtggagactgtgactcttcttgtagcattaaaggtgcgttatccagaacgcattacaatattgagaggaaatcacgaaagccgacaaattacccaagtatatggcttttatgatgaatgtctgcgaaagtatgggaatgccaacgtttggaaatattttacagatctctttgattatcttccacttacagctttagtagatggacagatattctgcctccatggtggcctctctccatccatagacacactggatcatataagagccctggatcgtttacaggaagttccacatgagggcccaatgtgtgatctgttatggtcagatccagatgatcgtggtggatggggtatttcaccacgtggtgctggctacacatttggacaagacatttctgaaacctttaaccatgccaatggtctcacactggtttctcgtgcccaccagcttgtaatggagggatacaattggtgtcatgatcggaatgtggttaccattttcagtgcacccaattactgttatcgttgtgggaaccaggctgctatcatggaattagatgacactttaaaatattccttccttcaatttgacccggcgcctcgtcgtggtgagcctcatgttacacggcgcaccccagactacttcctataaatttctcctgggaaacctgcctttgtatgtggaagtatacctggctttttaaaatatatgtatttaaaaacaaaaagcaacagtaatctatgtgtttctgtaacaaattgggatctgtcttggcattaaaccacatcatggaccaaatgtgccatactaatgatgagcatttagcacaatttgagactgaaatttagtacactatgttctagataggtcagtctaacagtttgcctgctgtatttatagtaaccattttcctttggactgttcaagcaaaaaaggtaactaactgcttcatctccttttgcgcttatttggaaattttagttatagtgtttaactggcatggattaatagagttggagttttatttttaagaaaaattcacaagctaacttccactaatccattatcctttattttattgaaatgtataattaacttaactgaagaaaaggttcttcttgggagtatgttgtcataacatttaaagagatttcccttcatttaaactaaattactgttttatgttgatctgcatatttctgtatatttgtcatgacagtgcttgcatcctatttggtgtg

SEQ ID NO: 2752 - protein, 309 aa, Homo sapiens
MDDKAFTKELDQWVEQLNECKQLNENQVRTLCEKAKEILTKESNVQEVRCPVTVCGDVHGQFHDLMELFRIGGKSPDTNYLFMGDYVDRGYYSVETVTLLVALKVRYPERITILRGNHESRQITQVYGFYDECLRKYGNANVWKYFTDLFDYLPLTALVDGQIFCLHGGLSPSIDTLDHIRALDRLQEVPHEGPMCDLLWSDPDDRGGWGISPRGAGYTFGQDISETFNHANGLTLVSRAHQLVMEGYNWCHDRNVVTIFSAPNYCYRCGNQAAIMELDDTLKYSFLQFDPAPRRGEPHVTRRTPDYFL

SEQ ID NO: 2753 - DNA, 1051 bp, Homo sapiens
ggaccgccgcctggttaaaggcgcttatttcccaggcagccgctgcagtcgccacacctttgcccctgctgcgatgaccctgtcgccacttctgctgttcctgccaccgctgctgctgctgctggacgtccccacggcggcggtgcaggcgtcccctctgcaagcgttagacttctttgggaatgggccaccagttaactacaagacaggcaatctatacctgcgggggcccctgaagaagtccaatgcaccgcttgtcaatgtgaccctctactatgaagcactgtgcggtggctgccgagccttcctgatccgggagctcttcccaacatggctgttggtcatggagatcctcaatgtcacgctggtgccctacggaaacgcacaggaacaaaatgtcagtggcaggtgggagttcaagtgccagcatggagaagaggagtgcaaattcaacaaggtggaggcctgcgtgttggatgaacttgacatggagctagccttcctgaccattgtctgcatggaagagtttgaggacatggagagaagtctgccactatgcctgcagctctacgccccagggctgtcgccagacactatcatggagtgtgcaatgggggaccgcggcatgcagctcatgcacgccaacgcccagcggacagatgctctccagccaccacacgagtatgtgccctgggtcaccgtcaatgggaaacccttggaagatcagacccagctccttacccttgtctgccagttgtaccagggcaagaagccggatgtctgcccttcctcaaccagctccctcaggagtgtttgcttcaagtgatggccggtgagctgcggagagctcatggaaggcgagtgggaacccggctgcctgcctttttttctgatccagaccctcggcacctgctacttaccaactggaaaattttatgcatcccatgaagcccagatacacaaaattccaccccatgatcaagaatcctgctccactaagaatggtgctaaagtaaaactagtttaataagcaaaaaaaaaaaaaaaaaaa

SEQ ID NO: 2754 - protein, 303 aa, Homo sapiens
MDSRHTFAPAAMTLSPLLLFLPPLLLLLDVPTAAVQASPLQALDFFGNGPPVNYKTGNLYLRGPLKKSNAPLVNVTLYYEALCGGCRAFLIRELFPTWLLVMEILNVTSVPYGNAQEQNVSGRWEFKCQLGEEECKFNKVEACVLDELDMELAFLTMSGMAWKSLRTWREVCHYACSSTPQGCRQNYHGVCNGGPRHAAHARQRPADRCSPATARVCALGHRQWETLGRSDPAPYPCLPVVPGQEAGCLPFLNQLPPECLLRVLAGGLRRAHGRRVGTRLPAFFSDPDPRHLLLTNWKILCIP

SEQ ID NO: 2755 - DNA, 1673 bp, Homo sapiens
ggaggccgcgcgagggctgacgaaccggaagaagaggaactgggcctgaaagggtaccggtgaccgctactgctgccggtgtttgcgtgtggcagggagccaggcctggcgagcggggtgtgtcgcgatgccggagctggcagtgcagaaggtggtggtccaccccctggtgctgctcagtgtggtggatcatttcaaccgaatcggcaaggttggaaaccagaagcgtgttgttggtgtgcttttggggtcatggcaaaagaaagtacttgatgtatcgaacagttttgcagttccttttgatgaagatgacaaagacgattctgtatggtttttagaccatgattatttggaaaacatgtatggaatgtttaagaaagtcaatgccagggaaagaatagttggctggtaccacacaggccctaaactacacaagaatgacattgccatcaacgaactcatgaaaagatactgtcctaattccgtattggtcatcattgatgtgaagccgaaggacctagggctgcctacagaagcgtacatttcagtggaagaagtccatgatgatggaactccaacctcgaaaacatttgaacacgtgaccagtgaaattggagcagaggaagctgaggaagttggagttgaacacttgttacgagatatcaaagacacgacggtgggcactctgtcccagcggatcacaaaccaggtccatggtttgaagggactgaactccaagcttctggatatcaggagctacctggaaaaagtcgccacaggcaagctgcccatcaaccaccagatcatctaccagctgcaggacgtcttcaacctgctgccagatgtcagcctgcaggagttcgtcaaggccttttacctgaagaccaatgaccagatggtggtagtgtacttggcctcgctgatccgttccgtggtcgccctgcacaacctcatcaacaacaagattgccaaccgggatgcagagaagaaagaagggcaggagaaagaagagagcaaaaaggataggaaagaggacaaggagaaagataaagataaggaaaagagtgatgtaaagaaagaggagaaaaaggagaaaaagtaaaacatgtattaaatagcttttttaatttgtaaattaaaatcttacaaactaaatcagtgtgctgctagagggttctttttcacttgacatgcttattagaaagctgacccaacaagagctctctgcctccggtcactcttgctgtggtgctacgtggaagtgaatggagactgatctcaaatctgaactgcagctttcgctgctgtgagttggggatatgatagtcagctcaggcttcagattgtatgagaaaaatgaagagaagtcaacaaatattttggtactcttcattcatttatctctaaaaccaggagttgaattttcctcatcttgaaagactcttggggtctgtttctggtattttacaaaattgctaagtggaatgcatgaattgcattatgttctctggtaacacgtagagttcagacccttctgaactctgttgataataccacaccatgttctggacccatagctctggcatcctcaggggttgtgatccagctccatatattgtttaccttcaaagatacaattaaatggcttgatttttaaaaaaaaaaaaaaaaaa

SEQ ID NO: 2756 - protein, 324 aa, Homo sapiens
MPELAVQKVVVHPLVLLSVVDHFNRIGKVGNQKRVVGVLLGSWQKKVLDVSNSFAVPFDEDDKDDSVWFLDHDYLENMYGMFKKVNARERIVGWYHTGPKLHKNDIAINELMKRYCPNSVLVIIDVKPKDLGLPTEAYISVEEVHDDGTPTSKTFEHVTSEIGAEEAEEVGVEHLLRDIKDTTVGTLSQRITNQVHGLKGLNSKLLDIRSYLEKVATGKLPINHQIIYQLQDVFNLLPDVSLQEFVKAFYLKTNDQMVVVYLASLIRSVVALHNLINNKIANRDAEKKEGQEKEESKKDRKEDKEKDKDKEKSDVKKEEKKEKK

SEQ ID NO: 2757 - DNA, 1590 bp, Homo sapiens
atgagagacggcttctcatcatggcggaccctagagataaggcgcttcaggactaccgcaagaagttgcttgaacacaaggagatcgacggccgtcttaaggagttaagggaacaattaaaagaacttaccaagcagtatgaaaagtctgaaaatgatctgaaggccctacagagtgttgggcagatcgtgggtgaagtgcttaaacagttaactgaagaaaaattcattgttaaagctaccaatggaccaagatatgttgtgggttgtcgtcgacagcttgacaaaagtaagctgaagccaggaacaagagttgctttggatatgactacactaactatcatgagatatttgccgagagaggtggatccactggtttataacatgtctcatgaggaccctgggaatgtttcttattctgagattggagggctatcagaacagatccgggaattaagagaggtgatagaattacctcttacaaacccagagttatttcagcgtgtaggaataatacctccaaaaggctgtttgttatatggaccaccaggtacgggaaaaacactcttggcacgagccgttgctagccagctggactgcaatttcttaaaggttgtatctagttctattgtagacaagtacattggtgaaagtgctcgtttgatcagagaaatgtttaattatgctagagatcatcaaccatgcatcatttttatggatgaaatagatgctattggtggtcgtcggttttctgagggtacttcagctgacagagagattcagagaacgttaatggagttactgaatcaaatggatggatttgatactctgcatagagttaaaatgatcatggctacaaacagaccagatacactggatcctgctttgctgcgtccaggaagattagatagaaaaatacatattgatttgccaaatgaacaagcaagattagacatactgaaaatccatgcaggtcccattacaaagcatggtgaaatagattatgaagcaattgtgaagctttcggatggctttaatggagcagatctgagaaatgtttgtactgaagcaggtatgttcgcaattcgtgctgatcatgattttgtagtacaggaagacttcatgaaagcagtcagaaaagtggctgattctaagaagctggagtctaaattggactacaaacctgtgtaatttactgtaagatttttgatggctgcatgacagatgttggcttattgtaaaaataaagttaaagaaaataatgtatgtattggcaatgatgtcattaaaagtatatgaataaaaatatgagtaacatcataaaaattagtaattcaacttttaagatacagaagaaatttgtatgtttgttaaagttgcatttattgcagcaagttacaaagggaaagtgttgaagcttttcatatttgctgcgtgagcattttgtaaaatattgaaagtggtttgagatagtggtataagaaagcatttcttatgacttattttgtatcatttgttttcctcatctaaaaagttgaataaaatctgtttgattcagttctcctacatataaaaaaaaaaaaaaaaaaaa

SEQ ID NO: 2758 - protein, 389 aa, Homo sapiens [sequence omitted]

SEQ ID NO: 2759 - DNA, 3091 bp, Homo sapiens
tttaaacgagctgtattaccccgcacagtgcaggagaaaagataattggctcaggtctcggctctgccatctaccacctgtggagccttagataagtcagttcttatctctgtcactcaacggtctcggtcttgtcatcttttacatggaatgtcatgaaatatacagtacattgcaggaactgcctcaggtaaagacttctagggttcagtaggtctcagtcgatccctctgagaaaggccgcaccctaaatgcacagactctgactctaaggggatggggtcggggaatctgcattttagtagcttctcaggtgattcagatgctcagtcaggattgagaaaccaggactcttcccagccctcctgttctctgatccacttctctgcttcctccacgtcctaacgattctccagttcccgcacagcaggagcgaagggaagaggggagagaaggcaccgctaaggaccgctggccccgccaggcggccgacctccccattccaggggcgccagccggcggattacataacgggctcggggcgcgttctcgcgaggtttccaccgccccctcctcgctccacgtcagagggaaccgggcggagcggccaacatggcggaacgcaggagacacaagaagcggatccaggaagttggtgaaccatctaaagaagagaaggctgtggccaagtatcttcgattcaactgtccaacaaagtccaccaatatgatgggtcaccgggttgattattttattgcttcaaaagcagtggactgtcttttggattcaaagtgggcaaaggccaagaaaggagaggaagctttatttacaaccagggagtctgtggttgactactgcaacaggcttttaaagaagcagttttttcaccgagccctaaaagtaatgaaaatgaaatatgataaagacataaagaaagaaaaagataaaggaaaagctgaaagtggaaaagaagaagataaaaagagcaagaaagaaaatataaaggatgagaagacaaaaaaagaaaaagagaaaaaaaaagatggtgaaaaggaagaatccaaaaaggaggaaactccaggaactcctaaaaagaaggaaactaagaaaaaattcaaacttgagccacatgatgatcaggtttttctggatggaaatgaggtgtatgtatggatctatgacccagttcactttaaaacatttgtcatgggattaattcttgtgattgcagtaatagcggccaccctcttccccctttggccagcagaaatgagagtaggtgtttattacctcagtgtgggtgcaggctgttttgtagccagtattcttctccttgctgttgctcgatgcattctatttctcatcatttggctcataactggaggaaggcaccacttttggttcttgccaaatctgactgctgatgtgggcttcattgactccttcaggcctctgtacacacatgaatacaaaggaccaaaagcagacttaaagaaagatgagaagtctgaaaccaaaaagcaacagaagtccgacagtgaggaaaagtcagacagtgagaaaaaggaagatgaggaggggaaagtaggaccaggaaatcatggaacagaaggctcggggggagaacggcattcagacacggacagtgacaggagggaagatgatcgatcccagcacagtagtggaaatggaaatgattttgaaatgataacaaaagaggaactggaacagcaaacagatggggattgtgaagaggatgaggaagaggaaaatgatggagaaacacctaaatcttcacatgaaaaatcataatctgactaattttgggactgaatgaataagtacaagaggttggattttctatgttggctgattaccatattgaacacatggcatttgtagcattctttaaatctatctactgagatgtatttgacattcaagcagttatattcggtccttcattttatagaatattggcactattattggtacagtttaaagccattaatatgttttatccatttgataattttacagtaagtaggtctcattcattttgacagttatcaaagatgtactttccacagttaaatttacattaatggcaatttttgatagttttatggctttttactgttagactaatcaaaaataactttaaaaggaacaaagaaactccaacatttcacattatgcatagttatgtagccatttcacagtttctttaagatgtgtaaactcattgtccttgatagtttttatttttcattataaaattataccaggagatttcttttaagattctgagttagcagagttcaaaactattttgtggaaacaagccaactagtaacaatgcagcaacacttctggtttagctaaattatttttccaatgtaggaaatccacactgatttgtacgtctgactgagagaaagatggtcgtctccagcagagaaagtgaacagcatttgttggaaggtgatggctctccctcctccctccccatttcattggcgtaacgtaaagtgtattctgtacataatttacaaataaaacattttattttaattgttacttattatttagatatttctcaacacttaaattcataaaattaagaccatgtaagggtatgtttttagagaaatggaagtttgagtaacccacagaacatctgtgatctttctacagcagcttcagttttgtgccaacattccatgtattttgaatatgagcaaaaactgatcttaagagcagacttaaagtagctttgtacgccttaatgttcattttgatttattttaaatctttacattcagaaatgagatactgtattatcagaccaggaggcattgctgtgaaagataatttcctattctaaaatatcaaatttaaaataaagataatgaaagaaaacataagagaactattggactctaattgctttgaactagttttgcagtttgactttacgtcttatacatcttagttacaagtctttggaaactcttgtttacttatgagcataatcattccttggagttatactaactaataatgaatattaaatgatttttcttcagtc

SEQ ID NO: 2760 - protein, 399 aa, Homo sapiens
MAERRRHKKRIQEVGEPSKEEKAVAKYLRFNCPTKSTNMMGHRVDYFIASKAVDCLLDSKWAKAKKGEEALFTTRESVVDYCNRLLKKQFFHRALKVMKMKYDKDIKKEKDKGKAESGKEEDKKSKKENIKDEKTKKEKEKKKDGEKEESKKEETPGTPKKKETKKKFKLEPHDDQVFLDGNEVYVWIYDPVHFKTFVMGLILVIAVIAATLFPLWPAEMRVGVYYLSVGAGCFVASILLLAVARCILFLIIWLITGGRHHFWFLPNLTADVGFIDSFRPLYTHEYKGPKADLKKDEKSETKKQQKSDSEEKSDSEKKEDEEGKVGPGNHGTEGSGGERHSDTDSDRREDDRSQHSSGNGNDFEMITKEELEQQTDGDCEEDEEEENDGETPKSSHEKS

SEQ ID NO: 2761 - DNA, 2784 bp, Homo sapiens
tcctggaattgcacgcgcttcctgaccaccaggctctggcccttgagaagccagcggggctttgtccctgttgctctccttgccaaacccagtctctctgctagtggtggtttcggttgcgacaccgtccaggttcccaggcaggaaccgctcggcctggctgcttagctacttttcactgaggaggtggtggaaggtgtcgcctgctctggctgagtaagggtggctggctgagccggcagcccccgccctaggcctggctcttcccggcctctgtactttgccctcgctgcctgacaggttctgctgtgggctctgctgaatggaagtcgctggtagtccttttccctttctccagtcggcccaccttgggacaccttgactccaagcccagcagtaagtccaacatgattcggggccgcaactcagccacctctgctgatgagcagccccacattggaaactaccggctcctcaagaccattggcaagggtaattttgccaaggtgaagttggcccgacacatcctgactgggaaagaggtagctgtgaagatcattgacaagactcaactgaactcctccagcctccagaaactattccgcgaagtaagaataatgaaggttttgaatcatcccaacatagttaaattatttgaagtgattgagactgagaaaacgctctaccttgtcatggagtacgctagtggcggagaggtatttgattacctagtggctcatggcaggatgaaagaaaaagaggctcgagccaaattccgccagatagtgtctgctgtgcagtactgtcaccagaagtttattgtccatagagacttaaaggcagaaaacctgctcttggatgctgatatgaacatcaagattgcagactttggcttcagcaatgaattcacctttgggaacaagctggacaccttctgtggcagtcccccttatgctgccccagaactcttccagggcaaaaaatatgatggacccgaggtggatgtgtggagcctaggagttatcctctatacactggtcagcggatccctgccttttgatggacagaacctcaaggagctgcgggaacgggtactgagggggaaataccgtattccattctacatgtccacggactgtgaaaacctgcttaagaaatttctcatccttaatcccagcaagagaggcactttagagcaaatcatgaaagatcgatggatgaatgtgggtcacgaagatgatgaactaaagccttacgtggagccactccctgactacaaggacccccggcggacagagctgatggtgtccatgggttatacacgggaagagatccaggactcgctggtgggccagagatacaacgaggtgatggccacctatctgctcctgggctacaagagctccgagctggaaggcgacaccatcaccctgaaaccccggccttcagctgatctaaccaatagcagcgcccaattcccatcccacaaggtacagcgaagcgtgtcggccaatcccaagcagcggcgcttcagcgaccaggctggtcctgccattcccacctctaattcttactctaagaagactcagagtaacaacgcagaaaataagcggcctgaggaggaccgggagtcagggcggaaagccagcagcacagccaaggtgcctgccagccccctgcccggtctggagaggaagaagaccaccccaaccccctccacgaacagcgtcctctccaccagcacaaatcgaagcaggaattccccacttttggagcgggccagcctcggccaggcctccatccagaatggcaaagacagcacagccccccagcgtgtccctgttgcctccccatccgcccacaacatcagcagcagtggtggagccccagaccgaactaacttcccccggggtgtgtccagccgaagcaccttccatgctgggcagctccgacaggtgcgggaccagcagaatttgccctacggtgtgaccccagcctctccctctggccacagccagggccggcggggggcctctgggagcatcttcagcaagttcacctccaagtttgtacgcaggaacctgaatgaacctgaaagcaaagaccgagtggagacgctcagacctcacgtggtgggcagtggcggcaacgacaaagaaaaggaagaatttcgggaggccaagccccgctccctccgcttcacgtggagtatgaagaccacgagctccatggagcccaacgagatgatgcgggagatccgcaaggtgctggacgcgaacagctgccagagcgagctgcatgagaagtacatgctgctgtgcatgcacggcacgccgggccacgaggacttcgtgcagtgggagatggaggtgtgcaaactgccgcggctctctctcaacggggttcgatttaagcggatatcgggcacctccatggccttcaaaaacattgcctccaaaatagccaacgagctgaagctttaacaggctgccaggagcgggggcggcgggggcgggccagctggacgggctgccggccgtgcgccgccccacctgggcgagactgcagcgatggattggtgtgtctccctgctggcacttctcccctccctggcccttctcagttttctcccacattcacccctgcccagagattcccccttctcctctcccctactggaggcaaaggaaggggagggtggatgggggggcagggctccccctcggtactgcggttgcacagagtatttcgcctaaaccaagaaattttttattaccaaaaaga

SEQ ID NO: 2762 - protein, 691 aa, Homo sapiens
MIRGRNSATSADEQPHIGNYRLLKTIGKGNFAKVKLARHILTGKEVAVKIIDKTQLNSSSLQKLFREVRIMKVLNHPNIVKLFEVIETEKTLYLVMEYASGGEVFDYLVAHGRMKEKEARAKFRQIVSAVQYCHQKFIVHRDLKAENLLLDADMNIKIADFGFSNEFTFGNKLDTFCGSPPYAAPELFQGKKYDGPEVDVWSLGVILYTLVSGSLPFDGQNLKELRERVLRGKYRIPFYMSTDCENLLKKFLILNPSKRGTLEQIMKDRWMNVGHEDDELKPYVEPLPDYKDPRRTELMVSMGYTREEIQDSLVGQRYNEVMATYLLLGYKSSELEGDTITLKPRPSADLTNSSAQFPSHKVQRSVSANPKQRRFSDQAGPAIPTSNSYSKKTQSNNAENKRPEEDRESGRKASSTAKVPASPLPGLERKKTTPTPSTNSVLSTSTNRSRNSPLLERASLGQASIQNGKDSTAPQRVPVASPSAHNISSSGGAPDRTNFPRGVSSRSTFHAGQLRQVRDQQNLPYGVTPASPSGHSQGRRGASGSIFSKFTSKFVRRNLNEPESKDRVETLRPHVVGSGGNDKEKEEFREAKPRSLRFTWSMKTTSSMEPNEMMREIRKVLDANSCQSELHEKYMLLCMHGTPGHEDFVQWEMEVCKLPRLSLNGVRFKRISGTSMAFKNIASKIANELKL

SEQ ID NO: 2763 - DNA, 2946 bp, Homo sapiens
tcctggaattgcacgcgcttcctgaccaccaggctctggcccttgagaagccagcggggctttgtccctgttgctctccttgccaaacccagtctctctgctagtggtggtttcggttgcgacaccgtccaggttcccaggcaggaaccgctcggcctggctgcttagctacttttcactgaggaggtggtggaaggtgtcgcctgctctggctgagtaagggtggctggctgagccggcagcccccgccctaggcctggctcttcccggcctctgtactttgccctcgctgcctgacaggttctgctgtgggctctgctgaatggaagtcgctggtagtccttttccctttctccagtcggcccaccttgggacaccttgactccaagcccagcagtaagtccaacatgattcggggccgcaactcagccacctctgctgatgagcagccccacattggaaactaccggctcctcaagaccattggcaagggtaattttgccaaggtgaagttggcccgacacatcctgactgggaaagaggtagctgtgaagatcattgacaagactcaactgaactcctccagcctccagaaactattccgcgaagtaagaataatgaaggttttgaatcatcccaacatagttaaattatttgaagtgattgagactgagaaaacgctctaccttgtcatggagtacgctagtggcggagaggtatttgattacctagtggctcatggcaggatgaaagaaaaagaggctcgagccaaattccgccagatagtgtctgctgtgcagtactgtcaccagaagtttattgtccatagagacttaaaggcagaaaacctgctcttggatgctgatatgaacatcaagattgcagactttggcttcagcaatgaattcacctttgggaacaagctggacaccttctgtggcagtcccccttatgctgccccagaactcttccagggcaaaaaatatgatggacccgaggtggatgtgtggagcctaggagttatcctctatacactggtcagcggatccctgccttttgatggacagaacctcaaggagctgcgggaacgggtactgagggggaaataccgtattccattctacatgtccacggactgtgaaaacctgcttaagaaatttctcatccttaatcccagcaagagaggcactttagagcaaatcatgaaagatcgatggatgaatgtgggtcacgaagatgatgaactaaagccttacgtggagccactccctgactacaaggacccccggcggacagagctgatggtgtccatgggttatacacgggaagagatccaggactcgctggtgggccagagatacaacgaggtgatggccacctatctgctcctgggctacaagagctccgagctggaaggcgacaccatcaccctgaaaccccggccttcagctgatctaaccaatagcagcgcccaattcccatcccacaaggtacagcgaagcgtgtcggccaatcccaagcagcggcgcttcagcgaccaggctggtcctgccattcccacctctaattcttactctaagaagactcagagtaacaacgcagaaaataagcggcctgaggaggaccgggagtcagggcggaaagccagcagcacagccaaggtgcctgccagccccctgcccggtctggagaggaagaagaccaccccaaccccctccacgaacagcgtcctctccaccagcacaaatcgaagcaggaattccccacttttggagcgggccagcctcggccaggcctccatccagaatggcaaagacagcctaaccatgccagggtcccgggcctccacggcttctgcttctgccgcagtctctgcggcccggccccgccagcaccagaaatccatgtcggcctccgtgcaccccaacaaggcctctgggctgccccccacggagagtaactgtgaggtgccgcggcccagcacagccccccagcgtgtccctgttgcctccccatccgcccacaacatcagcagcagtggtggagccccagaccgaactaacttcccccggggtgtgtccagccgaagcaccttccatgctgggcagctccgacaggtgcgggaccagcagaatttgccctacggtgtgaccccagcctctccctctggccacagccagggccggcggggggcctctgggagcatcttcagcaagttcacctccaagtttgtacgcaggaacctgaatgaacctgaaagcaaagaccgagtggagacgctcagacctcacgtggtgggcagtggcggcaacgacaaagaaaaggaagaatttcgggaggccaagccccgctccctccgcttcacgtggagtatgaagaccacgagctccatggagcccaacgagatgatgcgggagatccgcaaggtgctggacgcgaacagctgccagagcgagctgcatgagaagtacatgctgctgtgcatgcacggcacgccgggccacgaggacttcgtgcagtgggagatggaggtgtgcaaactgccgcggctctctctcaacggggttcgatttaagcggatatcgggcacctccatggccttcaaaaacattgcctccaaaatagccaacgagctgaagctttaacaggctgccaggagcgggggcggcgggggcgggccagctggacgggctgccggccgtgcgccgccccacctgggcgagactgcagcgatggattggtgtgtctccctgctggcacttctcccctccctggcccttctcagttttctcccacattcacccctgcccagagattcccccttctcctctcccctactggaggcaaaggaaggggagggtggatgggggggcagggctccccctcggtactgcggttgcacagagtatttcgcctaaaccaagaaattttttattaccaaaaaga

SEQ ID NO: 2764 - protein, 745 aa, Homo sapiens
MIRGRNSATSADEQPHIGNYRLLKTIGKGNFAKVKLARHILTGKEVAVKIIDKTQLNSSSLQKLFREVRIMKVLNHPNIVKLFEVIETEKTLYLVMEYASGGEVFDYLVAHGRMKEKEARAKFRQIVSAVQYCHQKFIVHRDLKAENLLLDADMNIKIADFGFSNEFTFGNKLDTFCGSPPYAAPELFQGKKYDGPEVDVWSLGVILYTLVSGSLPFDGQNLKELRERVLRGKYRIPFYMSTDCENLLKKFLILNPSKRGTLEQIMKDRWMNVGHEDDELKPYVEPLPDYKDPRRTELMVSMGYTREEIQDSLVGQRYNEVMATYLLLGYKSSELEGDTITLKPRPSADLTNSSAQFPSHKVQRSVSANPKQRRFSDQAGPAIPTSNSYSKKTQSNNAENKRPEEDRESGRKASSTAKVPASPLPGLERKKTTPTPSTNSVLSTSTNRSRNSPLLERASLGQASIQNGKDSLTMPGSRASTASASAAVSAARPRQHQKSMSASVHPNKASGLPPTESNCEVPRPSTAPQRVPVASPSAHNISSSGGAPDRTNFPRGVSSRSTFHAGQLRQVRDQQNLPYGVTPASPSGHSQGRRGASGSIFSKFTSKFVRRNLNEPESKDRVETLRPHVVGSGGNDKEKEEFREAKPRSLRFTWSMKTTSSMEPNEMMREIRKVLDANSCQSELHEKYMLLCMHGTPGHEDFVQWEMEVCKLPRLSLNGVRFKRISGTSMAFKNIASKIANELKL

SEQ ID NO: 2765 - DNA, 3331 bp, Homo sapiens
cagagggcaccgcccaggcctcggaaggtgtcagggagaactttccgtggtttcagcgtcgtcgcctggagcggcggtttagagagccgagcctgatgggcgccaaggccggctggctgcttggagcgctgcctcgaagggactgcgtaaggaagctaatccggagaacccaggccagagcctgaaatatggcgacctgcatcggggagaagatcgaggattttaaagttggaaatctgcttggtaaaggatcatttgctggtgtctacagagctgagtccattcacagtggtttggaagttgcaatcaaaatgatagataagaaagccatgtacaaagcaggaatggtacagagagtccaaaatgaggtgaaaatacattgccaattgaaacatccttctatcttggagctttataactattttgaagatagcaattatgtgtatctggtattagaaatgtgccataatggagaaatgaacaggtatctaaagaatagagtgaaacccttctcagaaaatgaagctcgacacttcatgcaccagatcatcacagggatgttgtatcttcattctcatggtatactacaccgggacctcacactttctaacctcctactgactcgtaatatgaacatcaagattgctgattttgggctggcaactcaactgaaaatgccacatgaaaagcactatacattatgtggaactcctaactacatttcaccagaaattgccactcgaagtgcacatggccttgaatctgatgtttggtccctgggctgtatgttttatacattacttatcgggagaccacccttcgacactgacacagtcaagaacacattaaataaagtagtattggcagattatgaaatgccaacttttttgtcaatagaggccaaggaccttattcaccagttacttcgtagaaatccagcagatcgtttaagtctgtcttcagtattggaccatccttttatgtcccgaaattcttcaacaaaaagtaaagatttaggaactgtggaagactcaattgatagtgggcatgccacaatttctactgcaattacagcttcttccagtaccagtataagtggtagtttatttgacaaaagaagacttttgattggtcagccactcccaaataaaatgactgtatttccaaagaataaaagttcaactgatttttcttcttcaggagatggaaacagtttttatactcagtggggaaatcaagaaaccagtaatagtggaaggggaagagtaattcaagatgcagaagaaaggccacattctcgataccttcgtagagcttattcctctgatagatctggcacttctaatagacagtctcaagcaaaaacatatacaatggaacgatgtcactcagcagaaatgctttcagtgtccaaaagatcaggaggaggtgaaaatgaagagaggtactcacccacagacaacaatgccaacatttttaacttctttaaagaaaagacatccagtagttctggatcttttgaaagacctgataacaatcaagcactctccaatcatctttgtccaggaaaaactccttttccatttgcagacccgacacctcagactgaaaccgtacaacagtggtttgggaatctgcaaataaatgctcatttaagaaaaactactgaatatgacagcatcagcccaaaccgggacttccagggccatccagatttgcagaaggacacatcaaaaaatgcctggactgatacaaaagtcaaaaagaactctgatgcttctgataatgcacattctgtaaaacagcaaaataccatgaaatatatgactgcacttcacagtaaacctgagataatccaacaagaatgtgtttttggctcagatcctctttctgaacagagcaagactaggggtatggagccaccatggggttatcagaatcgtacattaagaagcattacatctccgttggttgctcacaggttaaaaccaatcagacagaaaaccaaaaaggctgtggtgagcatacttgattcagaggaggtgtgtgtggagcttgtaaaggagtatgcatctcaagaatatgtgaaagaagttcttcagatatctagtgatggaaatacgatcactatttattatccaaatggtggtagaggttttcctcttgctgatagaccaccctcacctactgacaacatcagtaggtacagctttgacaatttaccagaaaaatactggcgaaaatatcaatatgcttccaggtttgtacagcttctaagatctaaatctcccaaaatcacttattttacaagatatgctaaatgcattttgatggagaattctcctggtgctgattttgaggtttggttttatgatggggtaaaaatacacaaaacagaagatttcattcaggtgattgaaaagacagggaagtcttacactttaaaaagtgaaagtgaagttaatagcttgaaagaggagataaaaatgtatatggaccatgctaatgagggtcatcgtatttgtttagcactggaatccataatttcagaagaggaaaggaaaactaggagtgctccctttttcccaataatcataggaagaaaacctggtagtactagttcacctaaggccttatcacctcctccttctgtggattcaaattacccaacgagagatagagcatctttcaacagaatggtcatgcatagtgatgcttctccaacacaggcaccaatccttaatccctctatggttacaaatgaaggacttggtcttacaactacagcttctggaacagacatctcttctaatagtctaaaagattgtcttcctaaatcagcacaacttttgaaatctgtttttgtgaaaaatgttggttgggctacacagttaactagtggagctgtgtgggttcagtttaatgatgggtcccagttggttgtgcaggcaggagtgtcttctatcagttatacctcaccaaatggtcaaacaactaggtatggagaaaatgaaaaattaccagactacatcaaacagaaattacagtgtctgtcttccatccttttgatgttttctaatccgactcctaattttcattgattaaaactcctttcagacatataagtttaataaataacttttttgttgactttcaagtaaagtgattttttttaatttaacataaagtcttcagaaagcctttctatgaaagaattttaacctataatgtaaaccatgtatctgagataacaaagcagaatgaaacttgagtcacttactaaatatagtggatataaaatagaacacctgactttgctcttagaccataa

SEQ ID NO: 2766 - protein, 970 aa, Homo sapiens
MATCIGEKIEDFKVGNLLGKGSFAGVYRAESIHTGLEVAIKMIDKKAMYKAGMVQRVKNEVKIHCQLKHPSILELYNYFEDSNYVYLVLEMCHNGEMNRYLKNRVKPFSENEARHFMHQIITGMLYLHSHGILHRDLTLSNLLLTRNMNIKIADFGLATQLKMPHEKHYTLCGTPNYISPEIATRSAHGLESDVWSLGCMFYTLLIGRPPFDTDTVKNTLNKVVLADYEMPTFLSIEAKDLIHQLLRRNPADRLSLSSVLDHPFMSRNSSTKSKDLGTVEDSIDSGHATISTAITASSSTSISGSLFDKRRLLIGQPLPNKMTVFPKNKSSTDFSSSGDGNSFYTQWGNQETSNSGRGRVIQDAEERPHSRYLRRAYSSDRSGTSNSQSQAKTYTMERCHSAEMLSVSKRSGGGENEERYSPTDNNANIFNFFKEKTSSSSGSFERPDNNQALSNHLCPGKTPFPFADPTPQTETVQQWFGNLQINAHLRKTTEYDSISPNRDFQGHPDLQKDTSKNAWTDTKVKKNSDASDNAHSVKQQNTMKYMTALHSKPEIIQQECVFGSDPLSEQSKTRGMEPPWGYQNRTLRSITSPLVAHRLKPIRQKTKKAVVSILDSEEVCVELVKEYASQEYVKEVLQISSDGNTITIYYPNGGRGFPLADRPPSPTDNISRYSFDNLPEKYWRKYQYASRFVQLVRSKSPKITYFTRYAKCILMENSPGADFEVWFYDGVKIHKTEDFIQVIEKTGKSYTLKSESEVNSLKEEIKMFMDHANEGHRICLALESIISEEERKTRSAPFFPIIIGRKPGSTSSPKALSPPPSVDSNYPTRDRASFNRMVMHSAASPTQAPILNPSMVTNEGLGLTTTASGTDISSNSLKDCLPKSAQLLKSVFVKNVGWATQLTSGAVWVQFNDGSQLVVQAGVSSISYTSPNGQTTRYGENEKLPDYIKQKLQCLSSILLMFSNPTPNFH

SEQ ID NO: 2767 - DNA, 1457 bp, Homo sapiens
ggccgcttcgggtttccggaggggccggagggcgggcgagggcgtcacgtgcgcgccgcccgcgggccggttggtccccgggcgggggaggggccgtgcgcagcctgggtcggggtcgggccggggtcggcacctgggacatccctgagggaagggccgggagcgggagcgccccagcggccggcgggcgggcgggcgagcggacgagcggcgcggagccggcccgaggcgcgcgccgagggagccccgtccccggtcgtgggggcaccgcccgcaggctctgcggggtgggcagctcccgggcctgccatgagctctccgccgcccgcccgcagtggcttttaccgccaggaggtgaccaagacggcctgggaggtgcgcgccgtgtaccgggacctgcagcccgtgggctcgggcgcctacggcgcggtgtgctcggccgtggacggccgcaccggcgctaaggtggccatcaagaagctgtatcggcccttccagtccgagctgttcgccaagcgcgcctaccgcgagctgcgcctgctcaagcacatgcgccacgagaacgtgatcgggctgctggacgtattcactcctgatgagaccctggatgacttcacggacttttacctggtgatgccgttcatgggcaccgacctgggcaagctcatgaaacatgagaagctaggcgaggaccggatccagttcctcgtgtaccagatgctgaaggggctgaggtatatccacgctgccggcatcatccacagagacctgaagcccggcaacctggctgtgaacgaagactgtgagctgaagatcctggacttcggcctggccaggcaggcagacagtgagatgactgggtacgtggtgacccggtggtaccgggctcccgaggtcatcttgaattggatgcgctacacgcagacggtggacatctggtccgtgggctgcatcatggcggagatgatcacaggcaagacgctgttcaagggcagcgaccacctggaccagctgaaggagatcatgaaggtgacggggacgcctccggctgagtttgtgcagcggctgcagagcgatgaggccaagaacaacatgaagggcctccccgaattggagaagaaggattttgcctctatcctgaccaatgcaagccctctggctgtgaacctcctggagaagatgctggtgctggacgcggagcagcgggtgacggcaggcgaggcgctggcccatccctacttcgagtccctgcacgacacggaagatgagccccaggtccagaagtatgatgactcctttgacgacgttgaccgcacactggatgaatggaagcgtgttacttacaaagaggtgctcagcttcaagcctccccggcagctgggggccagggtctccaaggagacgcctctgtgaagatctctgggctccggggtggcagtgaggaccaccttcacctt

SEQ ID NO: 2768 - protein, 367 aa, Homo sapiens
MSSPPPARSGFYRQEVTKTAWEVRAVYRDLQPVGSGAYGAVCSAVDGRTGAKVAIKKLYRPFQSELFAKRAYRELRLLKHMRHENVIGLLDVFTPDETLDDFTDFYLVMPFMGTDLGKLMKHEKLGEDRIQFLVYQMLKGLRYIHAAGIIHRDLKPGNLAVNEDCELKILDFGLARQADSEMTGYVVTRWYRAPEVILNWMRYTQTVDIWSVGCIMAEMITGKTLFKGSDHLDQLKEIMKVTGTPPAEFVQRLQSDEAKNNMKGLPELEKKDFASILTNASPLAVNLLEKMLVLDAEQRVTAGEALAHPYFESLHDTEDEPQVQKYDDSFDDVDRTLDEWKRVTYKEVLSFKPPRQLGARVSKETPL

SEQ ID NO: 2769 - DNA, 757 bp, Homo sapiens
tcgaaatgaaagcccgggaacgccggaagaagcacgggtgtaagatttcccttttcaaaggcggagaataagaaatcagcccgagagtgtaagggcgtcaatagcgctgtggacgagacagagggaatggggcaaggagcgaggctggggctctcaccgcgacttgaatgtggatgagagtgggacggtgacggcgggcgcgaaggcgagcgcatcgcttctcggccttttggctaagatcaagtgtagtatctgttcttatcagtttaatatctgatacgtcctctatccgaggacaatatattaaatggatttttggagcagggagatggaataggagcttgctccgtccactccacgcatcgacctggtattgcagtacctccaggaacggtgcaccccctccggggtacaacgtgtttcctaaaagtagagggaggtgagagacggtagcacctgcggggcggcttgcacgccgagtgcctgtgacgcgccggcttgacttaactgcttccctgaagtaccgtgaggttcctgatgtgcgggcggtagacggtaggcttatgcggcacgctttcgtttccaccgtggctactgcgctttgggaaggccacgacctcctcctttggggaggtccttaggatctcagcttggcagtcgagtgggtggcgaccttttaaaggaatgggacccacccggagatcttctttctcctgactctctctctctctctctctctctctctctctctctctct

SEQ ID NO: 2770 - DNA, 1831 bp, Homo sapiens
aaatagtgctgcagtaaacatacgtgtccacgtgtcttcctagtaggaacttcttcctcttcagcccgctgagtagctggcactttaaggcaggtgccaacgcaccggcagcaagcttccttttttgcccgggaaaaactgaggtgcaggtagtataagccattgatcacggaacgcacaggagcagagctcgagtccaagcatcgtggctccacccgtcatgctggatgcatctttaggctccgctctaggtatgtgtatcctttacgggatcagccaccggcagttgccttgcgagcacgatgacaaacctctgccggctcttttgggtctcatccctgtatctatacgttgcatcccaacataaagaccggaatgttcctttcgctgacccagtctctcaccctttccaaactccagaaatcttgtctgtcctcggaagaactccccctgcttctttctctaaaggctgtcttcaggccgggcacagtgggaggatcgcttgagcccagaaggccgcagtgaggtgagatcgcgccattgcactgcagcccccggcggcagagccggagccccgtctcgaaacaaacaaacaaaaaccaaccaaccaaccaaccaaccaacaaacaaacacagacaaagaaagaaagagcccaggcaacctagtgaaaacctgttcgggctggggcgtacctgtaccccagctgttccggaggctgaggccaggaggatgggtggacgctgggaggtggatgctgcagtgagcagtgattgcaccactgcactccagcctgggtgacagagccagaccccgtcccaaataaataaacataaaaataaaggaaccagtttgtagaaagcgggagagggtcccattgaacttcaagccttcgagcaacagctgtggctggacaggttggaccagcaggctggagcagtcgccatcttggcagggatcattgaccctgatctatcgtcgggaggaggaagagccgatcttacgcagggagggcaggtggactatgtgtggactctggtgacctgtttgggtgccaggtgttactcccagggccacccgtaactgtgaatgtgcaggaaccctgacttgagaagggcctggccacggggggcttaggcccctggggaatgagagtttggttcccggtacccagggaaaccaccagcatcggcagaggtgatagctgaggaggagcggggatttggacgagagacacaggatgagtaccggggggcagccccgtgatcaacaactgctgcaagaggggccgtttgttcgactcgctagtcttctgcggctctatgcggtactaaagagcagaagacagaagatacaaaaaccacaaaaagtagccgggcgtggtgctgcccgtcaataatcccagctactcgggaggctgagacaggagaatcgcttgaacccgggaggcggaagtttcagcgagccgagatcacgccgttgcagtccaacctgagcgtccgagcgagactctatctcagaaaataaagacagaatgaaagagcccggcgcggtggcttacgcctgtaatcccagcgctttgggaggccgaggcgggcggatcgcctgaggtcaggagctcgagaccagcctggccgacatggcgaaaccccctaaaaatacaaaaattagccgggcgtggtggcctgcgcctgtaatcccagctacccaggaggctgaggcaggagaatcgctggaacccgggaggtagaggctgcagtgagccgagatcgcgccactgcactccagcctgggcgacagagcgagagtttgtctgaaaaaaaaaaaaaaaaa

SEQ ID NO: 2771 - DNA, 2753 bp, Homo sapiens
gggaggtgagagacggtagcacctgcggggcggcttgcacgccgagtgcctgtgacgcgccggcttgacttaactgcttccctgaagtaccgtgaggttcctgatgtgcgggcggtagacggtaggcttatgcggcacgctttcgtttccaccgtggctactgcgctttgggaaggccacgacctcctcctttggggaggtccttaggatctcagcttggcagtcgagtgggtggcgaccttttaaaggaatgggacccacccggagttcttctttctcctgtctctctctctctctctctctctctctctttctctctctctctctctgtctctccgtctctctgtgtctgtctctgtctctctgtctgtctctctctctctctctctctctctctctctcctctctctgtctctctctctctttccctctctctctctcttcccccccccccgcctctccctcgctctttaggtttcccccaccccctcccaagttctggggtacatgtgcaggacgtgcaggtttggaacataggtacacgtgtgccacggtgctttgctgcacctatccaccagtcgtctaggtttgaagccccgcatgcgttggctatttgtcctaatgctctctctccccttgccccccacgccccgtcagggcccggcgtgtgatgttcccctccctgtgtcccatgtgttctcgctgttcaactcccacttaggagcgagaacatgcggtgtttggttttcgcttcctgtgtcagtttgctgagaatgaggccttccagcttcatccacgttcccgcagaggtcatgaactcatccttttttatggctgcgtagtaattccatgctgtatacgtgccacactttctttatccagcctatcattcatgggcattcgagttggttccaagtctttgctattgtaaatagtgctgcagtaaacatacgtgtccacgtgtcttcctagtaggaacttcttcctcttcagcccgctgagtagctggcactttaaggcaggtgccaacgcaccggcagcaagcttccttttttgcccgggaaaaactgaggtgcaggtagtataagccattgatcacggaacgcacaggagcagagctcgagtccaagcatcgtggctccacccgtcatgctggatgcatctttaggctccgctctaggtatgtgtatcctttacgggatcagccaccggcagttgccttgcgagcacgatgacaaacctctgccggctcttttgggtctcatccctgtatctatacgttgcatcccaacataaagaccggaatgttcctttcgctgacccagtctctcaccctttccaaactccagaaatcttgtctgtcctcggaagaactccccctgcttctttctctaaaggctgtcttcaggccgggcacagtgggaggatcgcttgagcccagaaggccgcagtgaggtgagatcgcgccattgcactgcagcccccggcggcagagccggagccccgtctcgaaacaaacaaacaaaaaccaaccaaccaaccaaccaaccaaccaacaaacacagacaaagaaagaaagagcccaggcaacctagtgaaaacctgttcgggctggggcgtacctgtaccccagctgttccggaggctgaggccaggaggatgggtggacgctgggaggtggatgctgcagtgagcagtgattgcaccactgcactccagcctgggtgacagagccagaccccgtcccaaataaataaacataaaaataaaggaaccagtttgtagaaagcgggagagggtcccattgaacttcaagccttcgagcaacagctgtggctggacaggttggaccagcaggctggagcagtcgccatcttggcagggatcattgaccctgatctatcgtcgggaggaggaagagccgatcttacgcagggagggcaggtggactatgtgtggactctggtgacctgtttgggtgccaggtgttactcccagggccacccgtaactgtgaatgtgcaggaaccctgacttgagaagggcctggccacgggggtcttaggcccctggggaatgagagtttggttcccggtacccagggaaaccaccagcatcggcagaggtgatagctgaggaggagcggggatttggacgagagacacaggatgagtaccggggggcagccccgtgatcaacaactgctgcaagaggggccgtttgttcgactcgctagtcttctgcggctctatgcggtactaaagagcagaagacagaagatacaaaaaccacaaaaagtagccgggcgtggtgctgcccgtcaataatcccagctactcgggaggctgagacaggagaatcgcttgaacccgggaggcggaagtttcagcgagccgagatcacgccgttgcagtccaacctgagcgtccgagcgagactctatctcagaaaataaagacagaatgaaagagcccggcgcggtggcttacgcctgtaatcccagcgctttgggaggccgaggcgggcggatcgcctgaggtcaggagctcgagaccagcctggccgacatggcgaaaccccctaaaaatacaaaaattagccgggcgtggtggcctgcgcctgtaatcccagctacccaggaggctgaggcaggagaatcgctggaacccgggaggtagaggctgcagtgagccgagatcgcgccactgcactccagcctgggcgacagagcgagagtttgtctgaaaaaaaaaa

SEQ ID NO: 2772 - DNA, 1816 bp, Homo sapiens
ggcacgagggtccacgtgtcttcctagtaggaacttcttcctcttcagcccgctgagtagctggcactttaaggcaggtgccaacgcaccggcagcaagcttccttttttgcccgggaaaaactgaggtgcaggtagtataagccattgatcacggaacgcacaggagcagagctcgagtccaagcatcgtggctccacccgtcatgctggatgcatctttaggctccgctctaggtatgtgtatcctttacgggatcagccaccggcagttgccttgcgagcacgatgacaaacctctgccggctcttttgggtctcatccctgtatctatacgttgcatcccaacataaagaccggaatgttcctttcgctgacccagtctctcaccctttccaaactccagaaatcttgtctgtcctcggaagaactccccctgcttctttctctaaaggctgtcttcaggccgggcacagtgggaggatcgcttgagcccagaaggccgcagtgaggtgagatcgcgccattgcactgcagcccccggcggcagagccggagccccgtctcgaaacaaacaaacaaaaaccaaccaaccaaccaacaaacaaacacagacaaagaaagaaagagcccaggcaacctagtgaaaacctgttcgggctggggcgtacctgtaccccagctgttccggaggctgaggccaggaggatgggtggacgctgggaggtggatgctgcagtgagcagtgattgcaccactgcactccagcctgggtgacagagccagaccccgtcccaaataaataaacataaaaataaaggaaccagtttgtagaaagcgggagagggtcccattgaacttcaagccttcgagcaacagctgtggctggacaggttggaccagcaggctggagcagtcgccatcttggcagggatcattgaccctgatctattcgtcgagaggaggaagagctgatcttacgcagggagggcaggtggactatgtgtggactctggtgacctgtttgggtgccaggtgttactcccagggccacccgtaactgtgaatgtgcaggaaccctgacttgagaagggcctggccacggggggcttaggcccctggggaatgagagtttggttcccggtacccagggaaaccaccagcatcggcagaggtgatagctgaggaggagcggggatttggacgagagacacaggatgagtaccggggggcagccccgtgatcaacaactgctgcaagaggggccgtttgttcgactcgctagtcttctgcggctctatgcggtactaaagagcagaagacagaacatacaaaaaccacaaaaagtagccgggcgtggtgctgcccgtcaataatcccagctactcgggaggctgagacaggagaatcgcttgaacccgggaggcggaagtttcagcgagccgagatcacgccgttgcagtccaacctgagcgtccgagcgagactctatctcagaaaataaagacagaatgaaagagcccggcgcggtggcttacgcctgtaatcccagcgctttgggaggccgaggcgggcggatcgcctgaggtcaggagctcgagaccagcctggccgacatggcgaaaccccctaaaaatacaaaaattagccgggcgtggtggcctgcgcctgtaatcccagctacccaggaggctgaggcaggagaatcgctggaacccgggaggtagaggctgcagtgagccgagatcgcgccactgcactccagcctgggcgacagagcgagagtttgtctgaaaaaaaaaaaaaaaaaaaaaaaaa

SEQ ID NO: 2773 - DNA, 5834 bp, Homo sapiens
aagcttccttttttgcccgggaaaaactgaggtgcaggtagtataagccattgatcacggaacgcacaggagcagagctcgagtccaagcatcgtggctccacccgtcatgctggatgcatctttaggctccgctctaggtatgtgtatcctttacgggatcagccaccggcagttgccttgcgagcacgatgacaaacctctgccggctcttttgggtctcatccctgtatctatacgttgcatcccaacataaagaccggaatgttcctttcgctgacccagtctctcaccctttccaaactccagaaatcttgtctgtcctcggaagaagaactccccctgcttctttctctaaaggctgtcttcaggccgggcacagtgggaggatcgcttgagcccagaaggccgcagtgaggtgagatcgcgccattgcactgcagcccccgcggccagagccggagccccgtctcgaaacaaacaaacaaaaaccaaccaaccaaccaacaaacaaacacagacaaagaaagaaagagcccaggcaacctagtgaaaacctgttcgggctggggcgtacctgtaccccagctgttccggagctgaggccaggaggatgggtggacgctgggaggtggatgctgcagtgagcagtgattgcaccactgcactccagcctgggtgacagagccagaccccgtcccaaataaataaacataaaaataaaggaaccagtttgtagaaagcgggagagggtcccattgaacttcaagccttcgagcaacagctgtggctggacaggttggaccagcaggctggagcagtcgccatcttggcagggatcattgaccctgatctatcgtcgggaggaggaagagcttatcttacgcagggagggcaggtggactatgtgtggactctggtgacctgtttgggtgccaggtgttactcccagggccacccgtaactgtgaatgtgcaggaaccctgacttgagaagggcctggccacggggcttaggcccctggggaatgagagtttggttcccggtacccagggaaaccaccagcatcggcagaggtgatagctgaggaggagcggggatttggacgagagacacaggatgagtaccggggggcagccccgtgatcaacaactgctgcaagaggggccgtttgttcgactcgctagtcttctgcggctctatgcggtactaaagagcagaagacagaacatacaaaaaccacaaaaagtagccgggcgtggtgctgcccgtcaataatcccagctactcgggaggctgagacaggagaatcgcttgaacccgggaggcggaagtttcagcgagccgagatcacgccgttgcagtccaacctgagcgtccgagcgagactctatctcagaaaataaagacagaatgaaagagcccggcgcgtggcttaccgcctgtaatcccagcgctttgggaggccgaggcgggcggatcgcctgaggtcaggagctcgagaccagcctggccgacatggcgaaaccccctaaaaatacaaaaattagccgggcgtggtggcctgcgcctgtaatcccagctacccaggaggctgaggcaggagaatcgctggaacccgggaggtagaggctgcagtgagccgagatcgcgccactgcactccagcctgggcgacagagcgagagtttgtctgaaaaaaaaaaaaaaaaaaaaaaaaaaaaaaaaaaaaaaaattgggagaattttgctcccactgccgtcaaaatcccatgtgtatttcacacttacagcacagctccattagaactgaccacatttccagggctccctggatacctgtggctagcggctgccatactacaccgtgctgggctgtagaatggggatgacaagacagggcggcggagattgtgttggcgtgaagcgagggaaacactcggccgcaggacaaaactaaaacagcaagggggcaccgaaagactcagtagtccacgtgaatatcctgattatgttgtagctgagataatgtagggtccacccctaccgggtctgtgggttttctcttcgcgtgtgtgcggagacgagagatcgaagagataaagacagaagacaaagagataggaagaaagacagctgggcccgggggaccactgccaccaaagcgcggagacagacaggtagtggccccgagtgcctggaggcgctgctatttattgtagtcaaggcaagggggcagggtaaggagtgccagtcatctccaatgatcgataggtcacgcgagtcacgtgtccactggacagggggcctttccctttgtggtagccgaggtggagagggaggacagcaaacgtcagcgtttcttctatgcacttatcagaaagatcgaagactgtggtactcctactagttctgctactgctgtcttctaagaacttaaaaggaggagccaggtgcacaggctgaacatgaaagtgaacaaggagcgtgaccactgaagcacagcatcacagggagacagacgttggagcctccggatgactcggcccggcctggctaatgtcagacctcccacaagaggtggtggagcggagcgttctctgtctcccctggagagagggagattcctttccgggtctgctaagtaacgggtgccttcccaggcactggggccaccgctagaccaaggcctgctaagtaaccagggccttcccaggcactggcattaccgctaggccaaggagccctccagcggcccttctctgggcgtgaatgagggctcacactctcgtcttctggtcacctctcactgtggcccttcagctcctaactctgtgtggcctggtttcccccaaggtaatcataatagaacagagatcattatggtaatagaacaaagagtgatgctacaaactaatgattaataatagtcagatataatcctatccgtttcctatctctagtaaaacttttcttattctaattattttctttgctgtactggaacagcttgtgccttcaggctcttgcctgggcagctccctggcttgcggcccacaagataagatatattgcgttgaactataatttatgttgattgctgaatgatttagggcgggggggtgggcaccctgaaattctgccctggaggagtggcctcaccctaaccctggccgtggctaataataaggcccacctcttagggccgtggagtgaaataagttttccaggtaatgcgcagtagagccctcagccctccgctgaagttgcgttaggaaggaggaagggagaggtaaatgctgagccgcaggcggcagtctgtgcctcggagagaaactttatcccaaccttgctggggccttgacgcccaccttgccccaagagcaccccggcagtcacccctgcctctggggtcctgccaccccgagcccgaccttcccccttttcccccgcgccgggccaatagcctcctaactgcgtcgtgctcatcacctttgcgtcgtttcttcgctccacaaacgtttactgagcgccttccacacgccaggcgccagactcgcgcggggaaacagggataagcactgaggaggggtcccagccctcagcgatgggatttcagagcgggagataaagggttgcccagaagggtggtgagtggaatagctgatataaacaacgggggcgcgatgaaatacacaggagggctgctagtcacatatggggcgggtgcgagggcccttgactaagggaggcttcctgcacgggtgacacccaagcggagtcctgacgacctgcgtcagaagtagccaggcgaggaggaggggaaaggaatccacgtcccgagcagagaggcagcttccctacacagcccaggacacggtccgcgcacagaagccgcaggagacgcaggcacaggggctggggagaatccttgctgggccctcgccgcctccctctgccgggtgtctggtgccagcctcctgcctggcagaggaactccagcccctgctcccggaagcccctccaggccttcggcttccctgactgggcatgggccctcgtcccctcgtcccctcgggtacggggccggtctccccgcccgcgcgcgaagtaaaggcccagcgcagcccgcgctcctgccctggggcctcgtctttctccaggaaaacgtggaccgctctccgccgacagtctcttccacagacccctgtcgccttcgccccccggtctcttccggttctgtcttttcgctggctcgatacgaacaaggaagtcgcccccagcgagccccggctcccccaggcagaggcggccccgggggcggagtcaacggcggaggcacgccctctgtgaaagggcggggcatgcaaattcgaaatgaaagcccgggaacgccgaagaagcacgggtgtaagatttcccttttcaaaggcgggagaataagaaatcagcccgagagtgtaagggcgtcaatagcgctgtggacgagacagagggaatggggcaaggagcgaggctggggctctcaccgcgacttgaatgtggatgagagtgggacggtgacggcgggcgcgaaggcgagcgcatcgcttctcggccttttggctaagatcaagtgtagtatctgttcttatcagtttaatatctgatacgtcctctatccgaggacaatatattaaatggatttttggagcagggagatggaataggagcttgctccgtccactccacgcatcgacctggtattgcagtacctccaggaacggtgcaccccctccgggatacaacgtgtttcctaaaagtagagggaggtgagagacggtagcacctgcggggcggcttgcacgagtcctgtgacgcgccggcttgacttaactgcttccctgaagtaccgtgaggttcctgatgtgcgggcggtagacggtaggcttatgcggcacgctttcgtttccaccgtggctactgcgctttgggaaggccacgacctcctcctttggggaggtccttaggatctcagcttggcagtcgagtgggtggcgaccttttaaaggaatgggacccacccggagttcttctttctcctgtctctctctctctctctctctctctctctctctctttctctctctctctctgtctctccgtctctctgtgtctgtctctgtctctctgtctgtctctctctctctctctctctctctcctctctctgtctctctctctctttccccccccctccccgcctctccctcgctctctcttttggtttcccccaccccctcccaagttctggggtacatgtgcaggacgtgcaggtttggaacataggtacacgtgtgccacggtgctttgctgcacctatccaccagtcgtctaggtttgaagccccgcatgcgttggctatttgtcctaatgctctctctccccttgccccccaccgcccgtcagggcccggcgtgtgatgttcccctccctgtgtcccatgtgttctcgctgttcaactcccacttaggagcgagaacatgcggtgtttggttttcgcttcctgtgtcagtttgctgagaatgaggccttccagcttcatccacgttcccgcagaggtcatgaactcatccttttttatggctgcgtagtaattccatgctgtatacgtgccacactttctttatccagcctatcattcatgggcattcgagttggttccaagtctttgctattgtaaatagtgctgcagtaaacatacgtgtccacgtgtcttcctagtaggaacttcttcctcttcagcccgctgagtagctggcactttaaggcatggccaacgcaccggcagcaagctt

SEQ ID NO: 2774 - DNA, 6132 bp, Homo sapiens
aagcttccttttttgcccgggaaaaactgaggtgcaggtagtataagccattgatcacggaacgcacaggagcagagctcgagtccaagcatcgtggctccacccgtcatgctggatgcatctttaggctccgctctaggtatgtgtatcctttacgggatcagccaccggcagttgccttgcgagcacgatgacaaacctctgccggctcttttgggtctcatccctgtatctatacgttgcatcccaacataaagaccggaatgttcctttcgctgacccagtctctcaccctttccaaactccagaaatcttgtctgtcctcggaagaagaactccccctgcttctttctctaaaggctgtcttcaggccgggcacagtgggaggatcgcttgagcccagaaggccgcagtgaggtgagatcgcgccattgcactgcagcccccgcggccagagccggagccccgtctcgaaacaaacaaacaaaaaccaaccaaccaaccaacaaacaaacacagacaaagaaagaaagagcccaggcaacctagtgaaaacctgttcgggctggggcgtacctgtaccccagctgttccggagctgaggccaggaggatgggtggacgctgggaggtggatgctgcagtgagcagtgattgcaccactgcactccagcctgggtgacagagccagaccccgtcccaaataaataaacataaaaataaaggaaccagtttgtagaaagcgggagagggtcccattgaacttcaagccttcgagcaacagctgtggctggacaggttggaccagcaggctggagcagtcgccatcttggcagggatcattgaccctgatctatcgtcgggaggaggaagagcttatcttacgcagggagggcaggtggactatgtgtggactctggtgacctgtttgggtgccaggtgttactcccagggccacccgtaactgtgaatgtgcaggaaccctgacttgagaagggcctggccacggggcttaggcccctggggaatgagagtttggttcccggtacccagggaaaccaccagcatcggcagaggtgatagctgaggaggagcggggatttggacgagagacacaggatgagtaccggggggcagccccgtgatcaacaactgctgcaagaggggccgtttgttcgactcgctagtcttctgcggctctatgcggtactaaagagcagaagacagaacatacaaaaaccacaaaaagtagccgggcgtggtgctgcccgtcaataatcccagctactcgggaggctgagacaggagaatcgcttgaacccgggaggcggaagtttcagcgagccgagatcacgccgttgcagtccaacctgagcgtccgagcgagactctatctcagaaaataaagacagaatgaaagagcccggcgcgtggcttaccgcctgtaatcccagcgctttgggaggccgaggcgggcggatcgcctgaggtcaggagctcgagaccagcctggccgacatggcgaaaccccctaaaaatacaaaaattagccgggcgtggtggcctgcgcctgtaatcccagctacccaggaggctgaggcaggagaatcgctggaacccgggaggtagaggctgcagtgagccgagatcgcgccactgcactccagcctgggcgacagagcgagagtttgtctgaaaaaaaaaaaaaaaaaaaaaaaagccagggtgagcggtggctcaagcctgtaatcgcaagcaacactttgggaggcggcacgtgggcagatcaccggagtcgggagttggagaccagcctgaccaacgtggagaaaccccatctgtactaaaaatacaaagttagccgggcgtggtggcacatgcctgtagtcccagctgctcgggaggctgaggcaggggaatcgcttgaacccgggaggtggaggttgcagagagcctagatcgcgccattggactccaggctgggtaacaagagcggaacctccgtctgaaaaaaaaaaaaaaaaaaaaaaattgggagaattttgctcccactgccgtcaaaatcccatgtgtatttcacacttacagcacagctccattagaactgaccacatttccagggctccctggatacctgtggctagcggctgccatactacaccgtgctgggctgtagaatggggatgacaagacagggcggcggagattgtgttggcgtgaagcgagggaaacactcggccgcaggacaaaactaaaacagcaagggggcaccgaaagactcagtagtccacgtgaatatcctgattatgttgtagctgagataatgtagggtccacccctaccgggtctgtgggttttctcttcgcgtgtgtgcggagacgagagatcgaagagataaagacagaagacaaagagataggaagaaagacagctgggcccgggggaccactgccaccaaagcgcggagacagacaggtagtggccccgagtgcctggaggcgctgctatttattgtagtcaaggcaagggggcagggtaaggagtgccagtcatctccaatgatcgataggtcacgcgagtcacgtgtccactggacagggggcctttccctttgtggtagccgaggtggagagggaggacagcaaacgtcagcgtttcttctatgcacttatcagaaagatcgaagactgtggtactcctactagttctgctactgctgtcttctaagaacttaaaaggaggagccaggtgcacaggctgaacatgaaagtgaacaaggagcgtgaccactgaagcacagcatcacagggagacagacgttggagcctccggatgactgcggcccggcctggctaatgtcagacctcccacaagaggtggtggagcggagcgttctctgtctcccctggagagagggagattcctttcccgggtctgctaagtaacgggtgccttcccaggcactggggccaccgctagaccaaggcctgctaagtaaccagggccttcccaggcactggcattaccgctaggccaaggagccctccagcggcccttctctgggcgtgaatgagggctcacactctcgtcttctggtcacctctcactgtggcccttcagctcctaactctgtgtggcctggtttcccccaaggtaatcataatagaacagagatcattatggtaatagaacaaagagtgatgctacaaactaatgattaataatagtcagatataatcctatccgtttcctatctctagtaaaacttttcttattctaattattttctttgctgtactggaacagcttgtgccttcaggctcttgcctgggcacctgggtggcttgcggcccacaagataagatatattgcgttgaactataatttatgttgattgctgaatgatttagggcgggggggtgggcaccctgaaattctgccctggaggagtggcctcaccctaaccctggccgtggctaataataaggcccacctcttagggccgtggagtgaaataagttttccaggtaatgcgcagtagagccctcagccctccgctgaagttgcgttaggaaggaggaagggagaggtaaatgctgagccgcaggcggcagtctgtgcctcggagagaaactttatcccaaccttgctggggccttgacgcccaccttgccccaagagcaccccggcagtcacccctgcctctggggtcctgccaccccgagcccgaccttcccccttttcccccgcgccgggccaatagcctcctaactgcgtcgtgctcatcacctttgcgtcgtttcttcgctccacaaacgtttactgagcgccttccacacgccaggcgccagactcgcgcggggaaacagggataagcactgaggaggggtcccagccctcagcgatgggatttcagagcgggagataaagggttgcccagaagggtggtgagtggaatagctgatataaacaacgggggcgcgatgaaatacacaggagggctgctagtcacatatggggcgggtgcgagggcccttgactaagggaggcttcctgcacgggtgacacccaagcggagtcctgacgacctgcgtcagaagtagccaggcgaggaggaggggaaaggaatccacgtcccgagcagagaggcagcttccctacacagcccaggacacggtccgcgcacagaagccgcaggagacgcaggcacaggggctggggagaatccttgctgggccctcgccgcctccctctgccgggtgtctggtgccagcctcctgcctggcagaggaactccagcccctgctcccggaagcccctccaggccttcggcttccctgactgggcatgggccctcgtcccctcgtcccctcgggtacggggccggtctccccgcccgcgcgcgaagtaaaggcccagcgcagcccgcgctcctgccctggggcctcgtctttctccaggaaaacgtggaccgctctccgccgacagtctcttccacagacccctgtcgccttcgccccccggtctcttccggttctgtcttttcgctggctcgatacgaacaaggaagtcgcccccagcgagccccggctcccccaggcagaggcggccccgggggcggagtcaacggcggaggcacgccctctgtgaaagggcggggcatgcaaattcgaaatgaaagcccgggaacgccgaagaagcacgggtgtaagatttcccttttcaaaggcgggagaataagaaatcagcccgagagtgtaagggcgtcaatagcgctgtggacgagacagagggaatggggcaaggagcgaggctggggctctcaccgcgacttgaatgtggatgagagtgggacggtgacggcgggcgcgaaggcgagcgcatcgcttctcggccttttggctaagatcaagtgtagtatctgttcttatcagtttaatatctgatacgtcctctatccgaggacaatatattaaatggatttttggagcagggagatggaataggagcttgctccgtccactccacgcatcgacctggtattgcagtacctccaggaacggtgcaccccctccgggatacaacgtgtttcctaaaagtagagggaggtgagagacggtagcacctgcggggcggcttgcacgagtcctgtgacgcgccggcttgacttaactgcttccctgaagtaccgtgaggttcctgatgtgcgggcggtagacggtaggcttatgcggcacgctttcgtttccaccgtggctactgcgctttgggaaggccacgacctcctcctttggggaggtccttaggatctcagcttggcagtcgagtgggtggcgaccttttaaaggaatgggacccacccggagttcttctttctcctgtctctctctctctctctctctctctctctctctctttctctctctctctctgtctctccgtctctctgtgtctgtctctgtctctctgtctgtctctctctctctctctctctctctcctctctctgtctctctctctctttccccccccctccccgcctctccctcgctctctcttttggtttcccccaccccctcccaagttctggggtacatgtgcaggacgtgcaggtttggaacataggtacacgtgtgccacggtgctttgctgcacctatccaccagtcgtctaggtttgaagccccgcatgcgttggctatttgtcctaatgctctctctccccttgccccccaccgcccgtcagggcccggcgtgtgatgttcccctccctgtgtcccatgtgttctcgctgttcaactcccacttaggagcgagaacatgcggtgtttggttttcgcttcctgtgtcagtttgctgagaatgaggccttccagcttcatccacgttcccgcagaggtcatgaactcatccttttttatggctgcgtagtaattccatgctgtatacgtgccacactttctttatccagcctatcattcatgggcattcgagttggttccaagtctttgctattgtaaatagtgctgcagtaaacatacgtgtccacgtgtcttcctagtaggaacttcttcctcttcagcccgctgagtagctggcactttaaggcatggccaacgcaccggcagcaagctt

SEQ ID NO: 2775 - RNA, 25 nt, Artificial
  antisense oligonucleotide
gcaguauaccucucgcucuugucaa

SEQ ID NO: 2776 - RNA, 25 nt, Artificial
  antisense oligonucleotide
uuuggaaguucuccaugaagcgcca

SEQ ID NO: 2777 - RNA, 25 nt, Artificial
  antisense oligonucleotide
guccaaagucugcuagcuugauggc

SEQ ID NO: 2778 - RNA, 25 nt, Artificial
  antisense oligonucleotide
cccaggaggauuucaggagcucggu

SEQ ID NO: 2779 - RNA, 25 nt, Artificial
  antisense oligonucleotide
uagaaguaacuccuggccacaccac

SEQ ID NO: 2780 - DNA, 23 bp, Artificial
  primer
agtaccgtgaggttcctgatgtg

SEQ ID NO: 2781 - DNA, 21 bp, Artificial
  primer
tgccaagctgagatcctaagg

SEQ ID NO: 2782 - DNA, 15 bp, Artificial
  primer
ttatgcggcacgctt

SEQ ID NO: 2783 - DNA, 19 bp, Artificial
  primer
cgacagtcagccgcatctt

SEQ ID NO: 2784 - DNA, 21 bp, Artificial
  primer
aaatccgttgactccgacctt

SEQ ID NO: 2785 - DNA, 16 bp, Artificial
  primer
catcgctcagacacca

SEQ ID NO: 2786 - DNA, 72 bp, Mus musculus
gctggagagatggcttagtggttaagagtaccgactgcttttccaaaggccctgtgttcaggtcccagcaac
